(19) United States
(12) Patent Application Publication
(10) Pub. No.: US 2014/0178391 A1
(43) Pub. Date: Jun. 26, 2014

(54) COLON DISEASE TARGETS AND USES THEREOF

(71) Applicant: Celera Corporation, Alameda, CA (US)

(72) Inventors: Bruno DOMON, Zurich (CH); Aiqun LI, Rockville, MD (US); Tao HE, Acton, MA (US); Ian MCCAFFREY, Rockville, MD (US)

(73) Assignee: Celera Corporation, Alameda, CA (US)

(21) Appl. No.: 14/057,434

(22) Filed: Oct. 18, 2013

Related U.S. Application Data
(62) Division of application No. 13/587,215, filed on Aug. 16, 2012, now abandoned.
Application No. 13/587,215 is a division of application No. 13/108,674, filed on May 16, 2011, now abandoned.
Application No. 13/108,674 is a division of application No. 12/077,323, filed on Mar. 17, 2008, now Pat. No. 7,960,100.
Application No. 12/077,323 is a division of application No. 11/085,606, filed on Mar. 22, 2005, now abandoned.
(60) Provisional application No. 60/566,425, filed on Apr. 30, 2004.
(60) Provisional application No. 60/576,812, filed on Jun. 4, 2004.

(51) Int. Cl. C07K 16/18; G01N 33/574

(52) U.S. Cl. CPC C07K 16/18; G01N 33/57419
USPC 424/139.1; 435/6.11; 435/7.92; 435/331; 435/375; 435/419; 435/252.33; 435/252.35; 435/254.2; 506/9; 514/21.2; 530/350; 530/387.3; 530/387.9; 530/391.3; 530/391.7; 536/23.5; 536/24.5

(57) ABSTRACT

The present invention provides a method for diagnosing and detecting diseases associated with colon. The present invention provides one or more proteins or fragments thereof, peptides or nucleic acid molecules differentially expressed in colon diseases (CCAT) and antibodies binds to CCAT. The present invention provides that CCAT is used as targets for screening agents that modulates the CCAT activities. Further the present invention provides methods for treating diseases associated with colon.

### CROSS-REFERENCE TO RELATED APPLICATIONS

[0001] This application is a divisional application of U.S. non-provisional application Ser. No. 13/587,215, filed Aug. 16, 2012, which is a divisional of U.S. non-provisional application Ser. No. 13/108,674, filed May 16, 2011 (which is now abandoned), which is a divisional application of U.S. non-provisional application of Ser. No. 12/077,323, filed Mar. 17, 2008 (issued as U.S. Pat. No. 7,960,100 on Jun. 14, 2011), which is a divisional application of U.S. non-provisional application Ser. No. 11/085,606, filed Mar. 22, 2005 (which is now abandoned), which claims priority to U.S. provisional application Ser. No. 60/566,425, filed Apr. 30, 2004, and U.S. provisional application Ser. No. 60/576,812, filed Jun. 4, 2004, the contents of each of which are hereby incorporated by reference into this application.

### FIELD OF THE INVENTION

[0002] This invention relates to the fields of molecular biology and oncology. Specifically, the invention provides a molecular marker and a therapeutic agent for use in the diagnosis and treatment of colon diseases.

### BACKGROUND OF THE INVENTION

[0003] Cancer currently constitutes the second most common cause of death in the United States. Carcinomas of the colon are the eighth most prevalent form of cancer and fourth among the most common causes of cancer deaths in this country. The incidence of colon cancer has been increasing steadily in the past twenty years in most industrialized countries, exhibiting the characteristics of a growing epidemiological problem. In the year 2000, for example, an estimated 28,600 deaths will be ascribed to this type of cancer and approximately 28,600 new cases will be diagnosed.

[0004] Colon cancer is the second most frequently diagnosed malignancy in the United States as well as the second most common cause of cancer death. The five-year survival rate for patients with colorectal cancer detected in an early localized stage is 92%; unfortunately, only 37% of colorectal cancer is diagnosed at this stage. The survival rate drops to 64% if the cancer is allowed to spread to adjacent organs or lymph nodes, and to 7% in patients with distant metastases.

[0005] The prognosis of colon cancer is directly related to the degree of penetration of the tumor through the bowel wall and the presence or absence of nodal involvement, consequently, early detection and treatment are especially important. Currently, diagnosis is aided by the use of screening assays for fecal occult blood, sigmoidoscopy, colonoscopy and double contrast barium enemas. Treatment regimens are determined by the type and stage of the cancer, and include surgery, radiation therapy and/or chemotherapy. Recurrence following surgery (the most common form of therapy) is a major problem and is often the ultimate cause of death. In spite of considerable research into therapies for the disease, colon cancer remains difficult to diagnose and treat. In spite of considerable research into therapies for these and other cancers, colon cancer remains difficult to diagnose and treat effectively. Accordingly, there is a need in the art for improved methods for detecting and treating such cancers. The present invention fulfills these needs and further provides other related advantages.

[0006] In spite of considerable research into therapies for these and other cancers, colon cancer remains difficult to diagnose and treat effectively. Accordingly, there is a need in the art for improved methods for detecting and treating such cancers. The present invention fulfills these needs and further provides other related advantages such as other colon diseases.

### SUMMARY OF THE INVENTION

[0007] The present invention is based on the identification of certain cell surface proteins (including shed proteins and secreted proteins) or cytosolic proteins that are differentially expressed in colon cancer. A malignant cell often differs from a normal cell by a differential expression of one or more proteins. These differentially expressed proteins, and the fragments thereof, are important markers for the diagnosis of colon disease. The differentially expressed proteins of the present invention and the nucleic acids encoding said proteins and the fragments of said proteins are referred to herein as colon cancer associated target, CCAT proteins or CCAT nucleic acids or CCAT peptides, respectively.

[0008] The present invention provides peptides and protein differentially expressed in colon diseases (hereinafter CCAT). Based on the site of protein localization, e.g., surface or cytosolic, and protein characterization, e.g. receptor or enzyme, specific uses of these CCATs are provided. Some of the CCATs of the present invention serve as targets for one or more classes of therapeutic agents, while others may be suitable for antibody therapeutics.

[0009] Accordingly, the present invention provides a method for diagnosing or detecting colon disease in a subject comprising: determining the level of one or more CCAT proteins, or any fragment(s) thereof, in a test sample from said subject, wherein said CCAT protein comprises a sequence selected from a group consisting of SEQ ID NOS: 1-683; wherein a differential level of said CCAT protein(s) or fragment(s) in said sample relative to the level of said protein(s) or fragment(s) in a test sample from a healthy subject, or the level established for a healthy subject, is indicative of colon disease.

[0010] The present invention also provides a method for detecting colon cancer in a subject comprising: determining the level of one or more CCAT peptide(s) comprising a peptide sequence selected from a group consisting of SEQ ID NOS: 1332-1501 in a test sample from said subject, wherein a differential level of said CCAT peptide(s) in said sample to the level of said CCAT peptide(s) in a test sample from a healthy subject, or the level of said CCAT peptide(s) established for a healthy subject, is indicative of colon disease.

[0011] The present invention further provides a method for detecting colon disease in a subject comprising: determining the level of one or more CCAT nucleic acid(s), or any fragment(s) thereof, in a test sample from said subject, wherein said CCAT nucleic acid(s) encode a CCAT protein sequence selected from a group consisting of SEQ ID NOS: 1-683; wherein a differential level of said CCAT nucleic acids or fragment(s) in said sample relative to the level of said protein(s) or fragment(s) in a test sample from a healthy subject, or the level established for a healthy subject, is indicative of colon disease.

[0012] The invention also provides methods for detecting the CCAT peptides, gene or mRNA in a test sample for use in diagnosing the presence, absence or progression of a disease. The test sample includes but is not limited to a biological sample such as tissue, blood, serum or biological fluid.

[0013] The present invention further provides a purified antibody that binds specifically to a protein molecule, or any fragment thereof, selected from a group consisting of SEQ ID NOS: 1-683.

[0014] The present invention further provides a composition comprising an antibody that binds to a protein selected from a group consisting of SEQ ID NOS: 1-682 and 683, and an acceptable carrier.

[0015] The present invention further provides a method for treating colon disease, comprising administering to a patient in need of said treatment a therapeutically effective amount of one or more antibody(ies) of this invention.

[0016] The present invention further provides a method for treating colon disease comprising (i) identifying a subject having colon disease and (ii) administering to a said patient a therapeutically effective amount of one or more antibody(ies) of this invention.

[0017] The present invention further provides a method to screen for agents that modulate CCAT protein activity, comprising the steps of (i) contacting a test agent with a CCAT protein and (ii) assaying for CCAT protein activity, wherein a change in said activity in the presence of said agent relative to CCAT protein activity in the absence of said agent indicates said agent modulates said CCAT protein activity.

[0018] The present invention further provides a method to screen for agents that bind to CCAT protein, comprising the steps of (i) contacting a test agent with a CCAT protein and (ii) measuring the level of binding of agent to said CCAT protein.

[0019] The invention also provides diagnostic methods for human disease, in particular for colon diseases, its metastatic stage, and therapeutic potential.

[0020] The present invention further provides diagnostic method for epithelial-cell related cancers. In particular, pancreas, lung, colon, prostate, ovarian, breast, bladder renal, hepatocellular, pharyngeal, and gastric cancers.

[0021] The invention also provides a method for monitoring the disease progression and the treatment progress.

[0022] The invention further provide a method of diagnosis by an array, wherein the array is immobilized with two or more CCAT proteins, peptides or nucleic acid molecules. The proteins, peptides or nucleic acid molecules include but are not limited to the SEQ ID NOS: 1-1501.

[0023] The invention also provides monoclonal or polyclonal antibodies and composition thereof reactive with antigenic portion of CCAT protein, peptides or fragments thereof in a form for use in colon disease diagnosis.

[0024] The invention further provides an immunogenic antibody for treating colon diseases disease or diseases associated with colon diseases.

[0025] The present invention provides a method for screening agents that modulate CCAT activity, comprising the steps of (a) contacting a sample comprising CCAT with an agent; and (b) assaying for CCAT activity, wherein a change in said CCAT activity in the presence of said agent relative to CCAT activity in the absence of said compound indicates said agent modulates CCAT. The agents include but are not limited to protein, peptide, antibody, nucleic acid such as antisense RNA, RNAi fragments, small molecules.

[0026] The present invention further provides a method for treating colon diseases, comprising: administering to a patient with one or more agents in a therapeutically effective amount to treat colon diseases.

[0027] The present invention provides a method for treating colon diseases, comprising: identifying a subject having colon diseases; and administering to a patient to one or more antibodies in a therapeutically effective amount to treat colon diseases.

[0028] The present invention further provide method for diagnosis and treatment for colon cancer.

[0029] The present invention further provides therapeutic potential for epithelial-cell related cancers. In particular pancreas, lung, colon, prostate, ovarian, breast, bladder renal, hepatocellular, pharyngeal and gastric cancers.

### Description of the Files Contained on the CD-R Named CL001515CDR

[0030] The CD-R named CL001515CDR contains the following two text (ASCII) files:

[0031] 1) File SEQLIST_{—}1515 txt provides the Sequence Listing. The Sequence Listing provides the protein sequences (SEQ ID NOS: 1-683); transcript sequences (SEQ ID NOS: 684-1331) and peptide sequences (SEQ ID NOS: 1332-1501) as shown in Table 1. File SEQLIST_{—}1515.txt is 5,852 KB in size and was created on Mar. 18, 2005.

[0032] 2) File TABLE1_{—}1515.txt provides Table 1. File TABLE1_{—}1515.txt is 165 KB in size and was created on Feb. 15, 2007.

[0033] The material contained on the CD-R labeled CL001515 CDR is hereby incorporated by reference pursuant to 37 CFR 1.77(b)(4).

LENGTHY TABLES
The patent application contains a lengthy table section. A copy of the table is available in electronic form from the USPTO web site (http://seqdata.uspto.gov/?pageRequest=docDetail&DocID=US20140178391A1). An electronic copy of the table will also be available from the USPTO upon request and payment of the fee set forth in 37 CFR 1.19(b)(3).

### Description of Table 1

[0034] Table 1 (provided on the CD-R) discloses the peptides which correspond to the protein in the colon cancer tumor tissues (“source”), the expression information, and the ratio compare to the control sample. The expression is based on measuring the level of the peptides. The ratio represents the number of overexpression by more than two, and numerical representation of overexpression is also indicated. “Singleton” indicates that the peptide peak in diseased sample was detected and there was no peak detected in control samples.

[0035] Table 1 also discloses the CCAT proteins, transcripts, and peptides sequences.

[0036] The transcript/protein information includes:
[0037] a protein number (1 through 683)
[0038] a Celera protein internal identification number for the protein encoded by the Celera transcript (hCP and/or UID)
[0039] a public protein accession number (Genbank e.g., RefSeq NP number, Swiss-prot, or Derwent) for the protein
[0040] an art-known gene/protein name
[0041] a Celera transcript internal identification number (hCT and/or UID)
[0042] a public transcript accession number (Genbank e.g., RefSeq NM number, or Derwent)
[0043] a Celera hCG and UID internal identification numbers for the gene
[0044] an art-known gene symbol
[0045] Celera genomic axis position (indicating start nucleotide position-stop nucleotide position)
[0046] the chromosome number of the chromosome on which the gene is located
[0047] an OMIM (Online Mendelian Inheritance in Man; Johns Hopkins University/NCBI) public reference number for obtaining further information regarding the medical significance of each gene
[0048] alternative gene/protein name(s) and/or symbol(s) in the OMIM entry

### DESCRIPTION OF FIGURES

[0049] FIG. 1. DPEP-1 expression in various tumor types by immunohistochemistry.

[0050] FIG. 2. Integrin Beta-4 expression in various tumor types by immunohistochemistry.

[0051] FIG. 3. Expression validation of DPEP-1 by mRNA.

[0052] FIG. 4. Flow cytometry validation in colon tumor tissues vs. normal tissues: Prominin-1.

[0053] FIG. 5. Flow cytomet validation in colon tumor tissues vs. normal tissues and hematopoietic cells: Integrin Beta-4.

[0054] FIG. 6. Knockdown of Leukocyte Elastase mRNA inhibits proliferation in HCT-116

[0055] FIG. 7. Knockdown of Leukocyte Elastase induces apoptosis in HCT 116 cells.

[0056] FIG. 8. Knockdown of Leukocyte Elastase induces apoptosis and inhibits proliferation in HCT 116 cells (normalized over 3 and 4 experiments) and this data was statistically significant.

[0057] FIG. 9. Knockdown of Defensin alpha 1 inhibits proliferation and this data was statistically significant (normalized over 3 experiments).

[0058] FIG. 10. Knockdown of Defensin alpha 1 mRNA inhibits proliferation in HCT 116.

### DETAILED DESCRIPTION OF THE PREFERRED EMBODIMENTS

### General Description

[0059] While the broadest definition of this invention is set forth in the Summary of the Invention, certain nucleic acids, peptides or proteins are preferred. For example a preferred method for detecting colon disease by determining the level of one or more CCAT protein(s) or any fragment(s) thereof is wherein the level of CCAT protein(s) are determined by contacting one or more antibody(ies) that specifically bind to the antigenic regions of the CCAT protein(s). Further preferred is a method wherein the level of two or more proteins are determined, more preferred wherein the level of four or more proteins are determined and most preferred wherein the level of eight or more proteins are determined.

[0060] A preferred method for detecting colon disease by determining the level of one or more CCAT peptide(s) is wherein the level of CCAT peptides(s) are determined by contacting one or more antibody(ies) that specifically bind to the antigenic regions of the CCAT peptide(s). Further preferred is a method wherein the level of five or more peptides are determined, more preferred wherein the level of ten or more peptides are determined and most preferred wherein the level of fifteen or more peptides are determined.

[0061] A preferred method for detecting colon disease by determining the level of one or more CCAT nucleic acid(s) is wherein the level of said CCAT nucleic acid(s) is determined by contacting one or more probes that specifically hybridize to said nucleic acid(s). Further preferred is a method wherein the level of two or more nucleic acids are determined, more preferred wherein the level of four or more nucleic acids are determined and most preferred wherein the level of eight or more nucleic acids are determined.

[0062] The methods for detecting colon disease provided by the present invention may be used for diagnosing the presence of disease in a patent, monitoring the presence of colon disease in patients undergoing treatment and testing for the reoccurrence of colon disease in patients that were successfully treated for colon disease; preferably wherein the colon disease is colon cancer. The test sample may be, but is not limited to, a biological sample such as tissue, blood, serum or biological fluid.

[0063] The present invention is based on the discovery of protein(s) and peptide(s) that are differentially expressed in colon cancer samples versus normal colon diseases samples. These proteins and peptide, and the encoding nucleic acid molecules are associated with colon diseases, hereinafter the CCAT protein, peptide or nucleic acids.

[0064] The discovery of disease specific target proteins is base on discoveries made using proteomics techniques. The method uses on MALDI-TOF TOF LC/MS analyses platform to generate protein expression profiles from colon diseases tissues or cell lines in an effort to discover and identify novel molecules associated with the disease.

[0065] Based on these discoveries, the present invention provides proteins, peptides, nucleic acids that are differential in colon diseases, as well as antibodies binds to the proteins or peptides. The present invention also provides methods for detection, monitoring, diagnosis, prognosis, preventive and treatment of colon diseases. The present invention provides a detection reagent, markers for colon diseases at various stages, comprises CCAT sequences isolated from human colon disease tissue, sera, cell lines, blood or biological fluids.

[0066] The present invention provides a method for treating colon diseases targeting at CCAT. The treatment includes administration of a therapeutically effective amount of composition comprise, but not limit to, an antibody, an immunogentic peptide which induces T cell response, a small molecule, a protein or a nucleic acid molecule. The composition further comprises an agonist or antigonist to CCAT. A “colon or colorectal disease” includes but not limited to colon cancer, colon tumor, diverticulosis, diverticulitis, Crohn's disease, ulcerative colitis, irritable bowel syndrome, inflammatory bowel disease, hemorrhoids, and anal fissure.

[0067] The present invention may further provide a diagnostic or therapeutic potential for epithelial-cell related cancers, which include but are not limited to pancreas, lung, colon, prostate, ovarian, breast, bladder renal, hepatocellular, pharyngeal and gastric cancers.

[0068] The present invention further provides the target for screening an agent for CCAT, wherein the agent is compounds of small molecules, proteins, peptides, nucleic acids, antibodies or other agonists or antigonists.

### CCAT Peptide/Proteins and Peptides

[0069] The present invention provides isolated CCAT peptide and protein molecules that consisting of, consisting essentially of, or comprising the amino acid sequences of the CCAT peptides and proteins disclosed in Table 1, as well as all obvious variants of these peptides that are within the art to make and use. Some of these variants are described in detail below.

[0070] In one embodiment CCAT peptides include, but are not limited to, the amino acid sequence of SEQ ID NOS: 1332-1501 and variants thereof. A CCAT protein includes, but is not limited to, the amino acid sequences of SEQ ID NOS: 1-683 and variants thereof. CCAT proteins may be differentially expressed in colon cell line, blood, tissue, serum or body fluids.

[0071] The peptide or protein or fragment thereof, to which the invention pertains, however, are not to be construed as encompassing peptide, protein or fragment that may be disclosed publicly prior to the present invention.

[0072] The CCAT proteins and peptides of the present invention can be purified to homogeneity or other degrees of purity. The level of purification will be based on the intended use. The critical feature is that the preparation allows for the desired function of the peptide, even if in the presence of considerable amounts of other components (the features of an isolated nucleic acid molecule is discussed below).

[0073] As used herein, a “peptide” is defined as amino acid sequences between 5-20 amino acids derived from CCAT proteins such as SEQ ID NOS: 1-683 or variants thereof. The peptide differentially expressed in either colon disease cell line, blood, tissue, serum or body fluids. In one embodiment peptides include, but are not limited to, the amino acid sequence of SEQ ID NOS: 1332-1501, or variants thereof.

[0074] As used herein, a “protein” is full-length protein differentially expressed in colon disease cell line, tissue, blood, serum or body fluids. A protein includes, but is not limited to, the amino acid sequences sequence of SEQ ID NOS: 1-683.

[0075] A peptide is said to be “isolated” or “purified” when it is substantially free of cellular material or free of chemical precursors or other chemicals. The peptides of the present invention can be purified to homogeneity or other degrees of purity. The level of purification will be based on the intended use. The critical feature is that the preparation allows for the desired function of the peptide, even if in the presence of considerable amounts of other components (the features of an isolated nucleic acid molecule are discussed below).

[0076] In some uses, “substantially free of cellular material” includes preparations of the peptide having less than about 30% (by dry weight) other proteins (i.e., contaminating protein), less than about 20% other proteins, less than about 10% other proteins, or less than about 5% other proteins. When the peptide is recombinantly produced, it can also be substantially free of culture medium, i.e., culture medium represents less than about 20% of the volume of the protein preparation.

[0077] The language “substantially free of chemical precursors or other chemicals” includes preparations of the peptide in which it is separated from chemical precursors or other chemicals that are involved in its synthesis. In one embodiment, the language “substantially free of chemical precursors or other chemicals” includes preparations of the CCAT peptide having less than about 30% (by dry weight) chemical precursors or other chemicals, less than about 20% chemical precursors or other chemicals, less than about 10% chemical precursors or other chemicals, or less than about 5% chemical precursors or other chemicals.

[0078] The isolated CCAT proteins and peptide can be purified from cells that naturally express it, purified from cells that have been altered to express it (recombinant), or synthesized using known protein synthesis methods. Sambrook et al., Molecular Cloning: A Laboratory Manual. 3rd. ed., Cold Spring Harbor Laboratory Press, Cold Spring Harbor, N.Y., (2001). Experimental data as provided in Table 1 indicates expression in human colon tumor tissues. For example, a nucleic acid molecule encoding the CCAT protein or peptide is cloned into an expression vector, the expression vector introduced into a host cell and the protein expressed in the host cell. The protein or peptide can then be isolated from the cells by an appropriate purification scheme using standard protein purification techniques. Many of these techniques are described in detail below.

[0079] A CCAT peptide or protein can be attached to heterologous sequences to form chimeric or fusion proteins. Such Schimeric and fusion proteins comprise a peptide operatively linked to a heterologous protein having an amino acid sequence not substantially homologous to the peptide. “Operatively linked” indicates that the peptide and the heterologous protein are fused in-frame. The heterologous protein can be fused to the N-terminus or C-terminus of the peptide.

[0080] In some uses, the fusion protein does not affect the activity of the peptide or protein per se. For example, the fusion protein can include, but is not limited to, fusion proteins, for example beta-galactosidase fusions, yeast two-hybrid GAL fusions, poly-His fusions, MYC-tagged, HI-tagged and Ig fusions. Such fusion proteins, particularly poly-His fusions, can facilitate the purification of recombinant CCAT proteins or peptides. In certain host cells (e.g., mammalian host cells), expression and/or secretion of a protein can be increased by using a heterologous signal sequence.

[0081] A chimeric or fusion CCAT protein or peptide can be produced by standard recombinant DNA techniques. For example, DNA fragments coding for the different protein sequences are ligated together in-frame in accordance with conventional techniques. In another embodiment, the fusion gene can be synthesized by conventional techniques including automated DNA synthesizers. Alternatively, PCR amplification of gene fragments can be carried out using anchor primers which give rise to complementary overhangs between two consecutive gene fragments which can subsequently be annealed and re-amplified to generate a chimeric gene sequence (see Ausubel et al., Current Protocols in Molecular Biology, 1992). Moreover, many expression vectors are commercially available that already encode a fusion moiety (e.g., a GST protein). A CCAT-encoding nucleic acid can be cloned into such an expression vector such that the fusion moiety is linked in-frame to the CCAT protein or peptide.

[0082] As mentioned above, the CCAT peptide or the CCAT protein has obvious variants of the amino acid sequence, such as naturally occurring mature forms of the CCAT, allelic/sequence variants of the CCAT, non-naturally occurring recombinantly derived variants of the CCATs, and orthologs and paralogs of the CCAT proteins or peptides. Such variants can readily be generated using art-known techniques in the fields of recombinant nucleic acid technology and protein biochemistry.

[0083] It is understood, however, that CCAT and variants exclude any amino acid sequences disclosed prior to the invention.

[0084] Such variants can readily be identified/made using molecular techniques and the sequence information disclosed herein. Further, such variants can readily be distinguished from other peptides based on sequence and/or structural homology to the CCAT peptides of the present invention. The degree of homology/identity present will be based primarily on whether the peptide is a functional variant or non-functional variant, the amount of divergence present in the paralog family and the evolutionary distance between the orthologs.

[0085] To determine the percent identity of two amino acid sequences or two nucleic acid sequences, the sequences are aligned for optimal comparison purposes (e.g., gaps can be introduced in one or both of a first and a second amino acid or nucleic acid sequence for optimal alignment and non-homologous sequences can be disregarded for comparison purposes). In a preferred embodiment, at least 30%, 40%, 50%, 60%, 70%, 80%, or 90% or more of the length of a reference sequence is aligned for comparison purposes. The amino acid residues or nucleotides at corresponding amino acid positions or nucleotide positions are then compared. When a position in the first sequence is occupied by the same amino acid residue or nucleotide as the corresponding position in the second sequence, then the molecules are identical at that position (as used herein amino acid or nucleic acid “identity” is equivalent to amino acid or nucleic acid “homology”). The percent identity between the two sequences is a function of the number of identical positions shared by the sequences, taking into account the number of gaps, and the length of each gap, which need to be introduced for optimal alignment of the two sequences.

[0086] The comparison of sequences and determination of percent identity and similarity between two sequences can be accomplished using a mathematical algorithm. (Computational Molecular Biology, Lesk, A. M., ed., Oxford University Press, New York, 1988; Biocomputing: Informatics and Genome Projects, Smith, D. W., ed., Academic Press, New York, 1993; Computer Analysis of Sequence Data, Part 1, Griffin, A. M., and Griffin, H. G., eds., Humana Press, New Jersey, 1994; Sequence Analysis in Molecular Biology, von Heinje, G., Academic Press, 1987; and Sequence Analysis Primer, Gribskov, M. and Devereux, J., eds., M Stockton Press, New York, 1991). In a preferred embodiment, the percent identity between two amino acid sequences is determined using the Needleman and Wunsch (J. Mol. Biol. (48):444-453 (1970)) algorithm which has been incorporated into the GAP program in the GCG software package, using either a Blossom 62 matrix or a PAM250 matrix, and a gap weight of 16, 14, 12, 10, 8, 6, or 4 and a length weight of 1, 2, 3, 4, 5, or 6. In yet another preferred embodiment, the percent identity between two nucleotide sequences is determined using the GAP program in the GCG software package (Devereux, J., et al., Nucleic Acids Res. 12(1):387 (1984)), using a NWSgapdna.CMP matrix and a gap weight of 40, 50, 60, 70, or 80 and a length weight of 1, 2, 3, 4, 5, or 6. In another embodiment, the percent identity between two amino acid or nucleotide sequences is determined using the algorithm of E. Myers and W. Miller (CABIOS, 4:11-17 (1989)) which has been incorporated into the ALIGN program (version 2.0), using a PAM120 weight residue table, a gap length penalty of 12 and a gap penalty of 4.

[0087] The nucleic acid and protein sequences of the present invention can further be used as a “query sequence” to perform a search against sequence databases to, for example, identify other family members or related sequences. Such searches can be performed using the NBLAST and XBLAST programs (version 2.0) of Altschul, et al. (J. Mol. Biol. 215:403-10 (1990)). BLAST nucleotide searches can be performed with the NBLAST program, score=100, wordlength=12 to obtain nucleotide sequences homologous to the nucleic acid molecules of the invention. BLAST protein searches can be performed with the XBLAST program, score=50, wordlength=3 to obtain amino acid sequences homologous to the proteins of the invention. To obtain gapped alignments for comparison purposes, Gapped BLAST can be utilized as described in Altschul et al. (Nucleic Acids Res. 25(17):3389-3402 (1997)). When utilizing BLAST and gapped BLAST programs, the default parameters of the respective programs (e.g., XBLAST and NBLAST) can be used.

[0088] Full-length pre-processed forms, as well as mature processed forms, of proteins that comprise one of the peptides of the present invention can readily be identified as having complete sequence identity to one of the CCAT peptides of the present invention as well as being encoded by the same genetic locus as the CCAT peptide provided herein.

[0089] Allelic variants of a CCAT peptide can readily be identified as being a human protein having a high degree (significant) of sequence homology/identity to at least a portion of the CCAT peptide as well as being encoded by the same genetic locus as the CCAT peptide provided herein. Genetic locus can readily be determined based on the genomic information provided in Table 1, such as the genomic sequence mapped to the reference human. As used herein, two proteins (or a region of the proteins) have significant homology when the amino acid sequences are typically at least about 70-80%, 80-90%, and more typically at least about 90-95% or more homologous. A significantly homologous amino acid sequence, according to the present invention, will be encoded by a nucleic acid sequence that will hybridize to a CCAT peptide encoding nucleic acid molecule under stringent conditions as more fully described below.

[0090] Paralogs of a CCAT peptide can readily be identified as having some degree of significant sequence homology/identity to at least a portion of the CCAT peptide, as being encoded by a gene from humans, and as having similar activity or function. Two proteins will typically be considered paralogs when the amino acid sequences are typically at least about 60% or greater, and more typically at least about 70% or greater homology through a given region or domain. Such paralogs will be encoded by a nucleic acid sequence that will hybridize to a CCAT peptide encoding nucleic acid molecule under moderate to stringent conditions as more fully described below.

[0091] Orthologs of a CCAT peptide can readily be identified as having some degree of significant sequence homology/identity to at least a portion of the CCAT peptide as well as being encoded by a gene from another organism. Preferred orthologs will be isolated from mammals, preferably primates, for the development of human therapeutic targets and agents. Such orthologs will be encoded by a nucleic acid sequence that will hybridize to a CCAT peptide encoding nucleic acid molecule under moderate to stringent conditions, as more fully described below, depending on the degree of relatedness of the two organisms yielding the proteins.

[0092] Non-naturally occurring variants of the CCAT peptides of the present invention can readily be generated using recombinant techniques. Such variants include, but are not limited to deletions, additions and substitutions in the amino acid sequence of the CCAT peptide. For example, one class of substitutions is conserved amino acid substitution. Such substitutions are those that substitute a given amino acid in a CCAT peptide by another amino acid of like characteristics. Typically seen as conservative substitutions are the replacements, one for another, among the aliphatic amino acids Ala, Val, Leu, and Be; interchange of the hydroxyl residues Ser and Thr; exchange of the acidic residues Asp and Glu; substitution between the amide residues Asn and Gln; exchange of the basic residues Lys and Arg; and replacements among the aromatic residues Phe and Tyr. Guidance concerning which amino acid changes are likely to be phenotypically silent are found in Bowie et al., Science 247:1306-1310 (1990).

[0093] Variant CCAT peptides can be fully functional or can lack function in one or more activities, e.g. ability to bind substrate, ability to phosphorylate substrate, ability to mediate signaling, etc. Fully functional variants typically contain only conservative variation or variation in non-critical residues or in non-critical regions.

[0094] Non-functional variants typically contain one or more non-conservative amino acid substitutions, deletions, insertions, inversions, or truncation or a substitution, insertion, inversion, or deletion in a critical residue or critical region.

[0095] Amino acids that are essential for function can be identified by methods known in the art, such as site-directed mutagenesis or alanine-scanning mutagenesis (Cunningham et al., Science 244:1081-1085 (1989)). The latter procedure introduces single alanine mutations at every residue in the molecule. The resulting mutant molecules are then tested for biological activity such as CCAT activity or in assays such as an in vitro proliferative activity. Sites that are critical for binding partner/substrate binding can also be determined by structural analysis such as crystallization, nuclear magnetic resonance or photoaffinity labeling (Smith et al., J. Mol. Biol. 224:899-904 (1992); de Vos et al. Science 255:306-312 (1992)).

[0096] The present invention further provides fragments of the CCATs, in addition to proteins and peptides that comprise and consist of such fragments, particularly those comprising the residues identified in Table 1. As used herein, a fragment comprises at least 8, 10, 12, 14, 16, 18, 20 or more contiguous amino acid residues from a CCAT. Such fragments can be chosen based on the ability to retain one or more of the biological activities of the CCAT or could be chosen for the ability to perform a function, e.g. bind a substrate or act as an immunogen. Particularly important fragments are biologically active fragments, peptides that are, for example, about 8 or more amino acids in length. Such fragments will typically comprise a domain or motif of the CCAT, e.g., active site, a transmembrane domain or a substrate-binding domain. Further, possible fragments include, but are not limited to, domain or motif containing fragments, soluble peptide fragments, and fragments containing immunogenic structures. Predicted domains and functional sites are readily identifiable by computer programs well known and readily available to those of skill in the art (e.g., PROSITE analysis).

[0097] Polypeptides often contain amino acids other than the 20 amino acids commonly referred to as the 20 naturally occurring amino acids. Further, many amino acids, including the terminal amino acids, may be modified by natural processes, such as processing and other post-translational modifications, or by chemical modification techniques well known in the art. Common modifications that occur naturally in CCATs are described in basic texts, detailed monographs, and the research literature, and they are well known to those of skill in the art.

[0098] Known modifications include, but are not limited to, acetylation, acylation, ADP-ribosylation, amidation, covalent attachment of flavin, covalent attachment of a heme moiety, covalent attachment of a nucleotide or nucleotide derivative, covalent attachment of a lipid or lipid derivative, covalent attachment of phosphotidylinositol, cross-linking, cyclization, disulfide bond formation, demethylation, formation of covalent cros slinks, formation of cystine, formation of pyroglutamate, formylation, gamma carboxylation, glycosylation, GPI anchor formation, hydroxylation, iodination, methylation, myristoylation, oxidation, proteolytic processing, phosphorylation, prenylation, racemization, selenoylation, sulfation, transfer-RNA mediated addition of amino acids to proteins such as arginylation, and ubiquitination.

[0099] Such modifications are well known to those of skill in the art and have been described in great detail in the scientific literature. Several particularly common modifications, glycosylation, lipid attachment, sulfation, gamma-carboxylation of glutamic acid residues, hydroxylation and ADP-ribosylation, for instance, are described in most basic texts, such as Proteins—Structure and Molecular Properties, 2nd Ed., T. E. Creighton, W. H. Freeman and Company, New York (1993). Many detailed reviews are available on this subject, such as by Wold, F., Posttranslational Covalent Modification of Proteins, B. C. Johnson, Ed., Academic Press, New York 1-12 (1983); Seifter et al. (Meth. Enzymol. 182: 626-646 (1990)) and Rattan et al. (Ann. N.Y. Acad. Sci. 663:48-62 (1992)).

[0100] Accordingly, the CCATs of the present invention also encompass derivatives or analogs in which a substituted amino acid residue is not one encoded by the genetic code, in which a substituent group is included, in which the mature CCAT is fused with another compound, such as a compound to increase the half-life of the CCAT (for example, polyethylene glycol), or in which the additional amino acids are fused to the mature CCAT, such as a leader or secretory sequence or a sequence for purification of the mature CCAT or a pro-protein sequence.

### Protein/Peptide Uses

[0101] The proteins of the present invention can be used in substantial and specific assays related to the functional information provided in Table 1; to raise antibodies or to elicit another immune response; as a reagent (including the labeled reagent) in assays designed to quantitatively determine levels of the protein (or its binding partner or ligand) in biological fluids; and as markers for tissues in which the corresponding protein is preferentially expressed (either constitutively or at a particular stage of tissue differentiation or development or in a disease state). Where the protein binds or potentially binds to another protein or ligand (such as, for example, in a CCAT-effector protein interaction or CCAT-ligand interaction), the protein can be used to identify the binding partner/ligand so as to develop a system to identify inhibitors of the binding interaction. Any or all of these uses are capable of being developed into reagent grade or kit format for commercialization as commercial products.

[0102] Methods for performing the uses listed above are well known to those skilled in the art. References disclosing such methods include “Molecular Cloning: A Laboratory Manual”, 3^{rd}. ed., Cold Spring Harbor Laboratory Press, Sambrook, J., E. F. Fritsch and T. Maniatis eds., 2001, and “Methods in Enzymology: Guide to Molecular Cloning Techniques”, Academic Press, Berger, S. L. and A. R. Kimmel eds., 1987.

[0103] The potential uses of the peptides of the present invention are based primarily on the source of the protein as well as the class/action of the protein. For example, CCATs isolated from humans and their human/mammalian orthologs serve as targets for identifying agents for use in mammalian therapeutic applications, e.g. a human drug, particularly in modulating a biological or pathological response in a cell or tissue that expresses the CCAT. Experimental data as provided in Table 1 indicate that the CCAT of the present invention are overexpressed in colon tumor tissue. A large percentage of pharmaceutical agents are being developed that modulate the activity of CCAT proteins, particularly members of the CCAT subfamily (see Background of the Invention). The structural and functional information provided in the Background and Figures provide specific and substantial uses for the molecules of the present invention, particularly in combination with the expression information provided in Table 1. Experimental data as provided in Table 1 indicates expression in human colon tumor tissues. Such uses can readily be determined using the information provided herein, that which is known in the art, and routine experimentation.

[0104] The proteins of the present invention (including variants and fragments that may have been disclosed prior to the present invention) are useful for biological assays related to CCATs that are related to members of the CCAT subfamily. Such assays involve any of the known CCAT functions or activities or properties useful for diagnosis and treatment of CCAT-related conditions that are specific for the subfamily of CCATs that the one of the present invention belongs to, particularly in cells and tissues that express the CCAT. Experimental data as provided in Table 1 indicate that the CCAT of the present invention are overexpressed in colon tumor tissue.

[0105] The proteins of the present invention are also useful in drug screening assays, in cell-based or cell-free systems. Cell-based systems can be native, i.e., cells that normally express the CCAT, as a biopsy or expanded in cell culture. Experimental data as provided in Table 1 indicates expression in human colon tumor tissues. In an alternate embodiment, cell-based assays involve recombinant host cells expressing the CCAT protein.

[0106] The polypeptides can be used to identify compounds or agents that modulate CCAT activity of the protein in its natural state or an altered form that causes a specific disease or pathology associated with the CCAT. Both the CCATs of the present invention and appropriate variants and fragments can be used in high-throughput screens to assay candidate compounds for the ability to bind to the CCAT. These compounds can be further screened against a functional CCAT to determine the effect of the compound on the CCAT activity. Further, these compounds can be tested in animal or invertebrate systems to determine activity/effectiveness. Compounds can be identified that activate (agonist) or inactivate (antagonist) the CCAT to a desired degree.

[0107] Further, the proteins of the present invention can be used to screen a compound or an agent for the ability to stimulate or inhibit interaction between the CCAT protein and a molecule that normally interacts with the CCAT protein, e.g. a substrate or or an extracellular binding ligand or a component of the signal pathway that the CCAT protein normally interacts (for example, a cytosolic signal protein or another CCAT). Such assays typically include the steps of combining the CCAT protein with a candidate compound under conditions that allow the CCAT protein, or fragment, to interact with the target molecule, and to detect the formation of a complex between the protein and the target or to detect the biochemical consequence of the interaction with the CCAT protein and the target, such as any of the associated effects of signal transduction such as protein phosphorylation, cAMP turnover, and adenylate cyclase activation, etc.

[0108] Candidate compounds or agents include, for example, 1) peptides such as soluble peptides, including Ig-tailed fusion peptides and members of random peptide libraries (see, e.g., Lam et al., Nature 354:82-84 (1991); Houghten et al., Nature 354:84-86 (1991)) and combinatorial chemistry-derived molecular libraries made of D- and/or L-configuration amino acids; 2) phosphopeptides (e.g., members of random and partially degenerate, directed phosphopeptide libraries, see, e.g., Songyang et al., Cell 72:767-778 (1993)); 3) antibodies (e.g., polyclonal, monoclonal, humanized, anti-idiotypic, chimeric, and single chain antibodies as well as Fab, F(ab′)2, Fab expression library fragments, and epitope-binding fragments of antibodies); and 4) small organic and inorganic molecules (e.g., molecules obtained from combinatorial and natural product libraries).

[0109] One candidate compound or agent is a soluble fragment of the CCAT that competes for substrate binding. Other candidate compounds include mutant CCATs or appropriate fragments containing mutations that affect CCAT function and thus compete for substrate. Accordingly, a fragment that competes for substrate, for example with a higher affinity, or a fragment that binds substrate but does not allow release, is encompassed by the invention.

[0110] The invention further includes other end point assays to identify compounds that modulate (stimulate or inhibit) CCAT activity. The assays typically involve an assay of events in the signal transduction pathway that indicate CCAT activity. Thus, the phosphorylation of a substrate, activation of a protein, a change in the expression of genes that are up- or down-regulated in response to the CCAT protein dependent signal cascade can be assayed.

[0111] Any of the biological or biochemical functions mediated by the CCAT can be used as an endpoint assay. These include all of the biochemical or biochemical/biological events described herein, in the references cited herein, incorporated by reference for these endpoint assay targets, and other functions known to those of ordinary skill in the art or that can be readily identified using the information provided in Table 1. Specifically, a biological function of a cell or tissues that expresses the CCAT can be assayed. Experimental data as provided in Table 1 indicate that the CCAT of the present invention are overexpressed in colon tumor tissue.

[0112] Binding and/or activating compounds can also be screened by using chimeric CCAT proteins in which the amino terminal extracellular domain, or parts thereof, the entire transmembrane domain or subregions, such as any of the seven transmembrane segments or any of the intracellular or extracellular loops and the carboxy terminal intracellular domain, or parts thereof, can be replaced by heterologous domains or subregions. For example, a substrate-binding region can be used that interacts with a different substrate then that which is recognized by the native CCAT. Accordingly, a different set of signal transduction components is available as an end-point assay for activation. This allows for assays to be performed in other than the specific host cell from which the CCAT is derived.

[0113] The proteins of the present invention are also useful in competition binding assays in methods designed to discover compounds that interact with the CCAT (e.g. binding partners and/or ligands). Thus, a compound is exposed to a CCAT polypeptide under conditions that allow the compound to bind or to otherwise interact with the polypeptide. Soluble CCAT polypeptide is also added to the mixture. If the test compound interacts with the soluble CCAT polypeptide, it decreases the amount of complex formed or activity from the CCAT. This type of assay is particularly useful in cases in which compounds are sought that interact with specific regions of the CCAT. Thus, the soluble polypeptide that competes with the target CCAT region is designed to contain peptide sequences corresponding to the region of interest.

[0114] To perform cell free drug screening assays, it is sometimes desirable to immobilize either the CCAT protein, or fragment, or its target molecule to facilitate separation of complexes from uncomplexed forms of one or both of the proteins, as well as to accommodate automation of the assay.

[0115] Techniques for immobilizing proteins on matrices can be used in the drug screening assays. In one embodiment, a fusion protein can be provided which adds a domain that allows the protein to be bound to a matrix. For example, glutathione-S-transferase fusion proteins can be adsorbed onto glutathione sepharose beads (Sigma Chemical, St. Louis, Mo.) or glutathione derivatized microtitre plates, which are then combined with the cell lysates (e.g., ³⁵S-labeled) and the candidate compound, and the mixture incubated under conditions conducive to complex formation (e.g., at physiological conditions for salt and pH). Following incubation, the beads are washed to remove any unbound label, and the matrix immobilized and radiolabel determined directly, or in the supernatant after the complexes are dissociated. Alternatively, the complexes can be dissociated from the matrix, separated by SDS-PAGE, and the level of CCAT-binding protein found in the bead fraction quantitated from the gel using standard electrophoretic techniques. For example, either the polypeptide or its target molecule can be immobilized utilizing conjugation of biotin and streptavidin using techniques well known in the art. Alternatively, antibodies reactive with the protein but which do not interfere with binding of the protein to its target molecule can be derivatized to the wells of the plate, and the protein trapped in the wells by antibody conjugation. Preparations of a CCAT-binding protein and a candidate compound are incubated in the CCAT protein-presenting wells and the amount of complex trapped in the well can be quantitated. Methods for detecting such complexes, in addition to those described above for the GST-immobilized complexes, include immunodetection of complexes using antibodies reactive with the CCAT protein target molecule, or which are reactive with CCAT protein and compete with the target molecule, as well as CCAT-linked assays which rely on detecting an enzymatic activity associated with the target molecule.

[0116] Agents that modulate one of the CCATs of the present invention can be identified using one or more of the above assays, alone or in combination. It is generally preferable to use a cell-based or cell free system first and then confirm activity in an animal or other model system. Such model systems are well known in the art and can readily be employed in this context.

[0117] Modulators of CCAT protein activity identified according to these drug screening assays can be used to treat a subject with a disorder mediated by the CCAT pathway, by treating cells or tissues that express the CCAT. Experimental data as provided in Table 1 indicates expression in human colon tumor tissues. These methods of treatment include the steps of administering a modulator of CCAT activity in a pharmaceutical composition to a subject in need of such treatment, the modulator being identified as described herein.

[0118] In yet another aspect of the invention, the CCAT proteins can be used as “bait proteins” in a two-hybrid assay or three-hybrid assay (see, e.g., U.S. Pat. No. 5,283,317; Zervos et al. (1993) Cell 72:223-232; Madura et al. (1993) J. Biol. Chem. 268:12046-12054; Bartel et al. (1993) Biotechniques 14:920-924; Iwabuchi et al. (1993) Oncogene 8:1693-1696; and Brent WO94/10300), to identify other proteins, which bind to or interact with the CCAT and are involved in CCAT activity. Such CCAT-binding proteins are also likely to be involved in the propagation of signals by the CCAT proteins or CCAT targets as, for example, downstream elements of a CCAT-mediated signaling pathway. Alternatively, such CCAT-binding proteins are likely to be CCAT inhibitors.

[0119] The two-hybrid system is based on the modular nature of most transcription factors, which consist of separable DNA-binding and activation domains. Briefly, the assay utilizes two different DNA constructs. In one construct, the gene that codes for a CCAT protein is fused to a gene encoding the DNA binding domain of a known transcription factor (e.g., GAL-4). In the other construct, a DNA sequence, from a library of DNA sequences that encode an unidentified protein (“prey” or “sample”) is fused to a gene that codes for the activation domain of the known transcription factor. If the “bait” and the “prey” proteins are able to interact, in vivo, forming a CCAT-dependent complex, the DNA-binding and activation domains of the transcription factor are brought into close proximity. This proximity allows transcription of a reporter gene (e.g., LacZ) which is operably linked to a transcriptional regulatory site responsive to the transcription factor. Expression of the reporter gene can be detected and cell colonies containing the functional transcription factor can be isolated and used to obtain the cloned gene which encodes the protein which interacts with the CCAT protein.

[0120] This invention further pertains to novel agents identified by the above-described screening assays. Accordingly, it is within the scope of this invention to further use an agent identified as described herein in an appropriate animal model. For example, an agent identified as described herein (e.g., a CCAT-modulating agent, an antisense CCAT nucleic acid molecule, an CCAT-RNAi fragment, a CCAT-specific antibody, or a CCAT-binding partner) can be used in an animal or other model to determine the efficacy, toxicity, or side effects of treatment with such an agent. Alternatively, an agent identified as described herein can be used in an animal or other model to determine the mechanism of action of such an agent. Furthermore, this invention pertains to uses of novel agents identified by the above-described screening assays for treatments as described herein.

[0121] The CCAT proteins of the present invention are also useful to provide a target for diagnosing a disease or predisposition to disease mediated by the peptide. Accordingly, the invention provides methods for detecting the presence, or levels of, the protein (or encoding mRNA) in a cell, tissue, or organism. Experimental data as provided in Table 1 indicates expression in human colon tumor tissues. The method involves contacting a biological sample with a compound capable of interacting with the CCAT protein such that the interaction can be detected. Such an assay can be provided in a single detection format or a multi-detection format such as an antibody chip array.

[0122] One agent for detecting a protein in a sample is an antibody capable of selectively binding to protein. A biological sample includes tissues, cells and biological fluids isolated from a subject, as well as tissues, cells and fluids present within a subject.

[0123] The peptides of the present invention also provide targets for diagnosing active protein activity, disease, or predisposition to disease, in a patient having a variant peptide, particularly activities and conditions that are known for other members of the family of proteins to which the present one belongs. Thus, the peptide can be isolated from a biological sample and assayed for the presence of a genetic mutation that results in aberrant peptide. This includes amino acid substitution, deletion, insertion, rearrangement, (as the result of aberrant splicing events), and inappropriate post-translational modification. Analytic methods include altered electrophoretic mobility, altered tryptic peptide digest, altered CCAT activity in cell-based or cell-free assay, alteration in substrate or antibody-binding pattern, altered isoelectric point, direct amino acid sequencing, and any other of the known assay techniques useful for detecting mutations in a protein. Such an assay can be provided in a single detection format or a multi-detection format such as an antibody chip array.

[0124] In vitro techniques for detection of peptide include enzyme linked immunosorbent assays (ELISAs), Western blots, immunoprecipitations and immunofluorescence using a detection reagent, such as an antibody or protein binding agent. Alternatively, the peptide can be detected in vivo in a subject by introducing into the subject a labeled anti-peptide antibody or other types of detection agent. For example, the antibody can be labeled with a radioactive marker whose presence and location in a subject can be detected by standard imaging techniques. Particularly useful are methods that detect the allelic variant of a peptide expressed in a subject and methods which detect fragments of a peptide in a sample.

[0125] The peptides are also useful in pharmacogenomic analysis. Pharmacogenomics deal with clinically significant hereditary variations in the response to drugs due to altered drug disposition and abnormal action in affected persons. See, e.g., Eichelbaum, M. (Clin. Exp. Pharmacol. Physiol. 23(10-11):983-985 (1996)), and Linder, M. W. (Clin. Chem. 43(2):254-266 (1997)). The clinical outcomes of these variations result in severe toxicity of therapeutic drugs in certain individuals or therapeutic failure of drugs in certain individuals as a result of individual variation in metabolism. Thus, the genotype of the individual can determine the way a therapeutic compound acts on the body or the way the body metabolizes the compound. Further, the activity of drug metabolizing enzymes affects both the intensity and duration of drug action. Thus, the pharmacogenomics of the individual permit the selection of effective compounds and effective dosages of such compounds for prophylactic or therapeutic treatment based on the individual's genotype. The discovery of genetic polymorphisms in some drug metabolizing enzymes has explained why some patients do not obtain the expected drug effects, show an exaggerated drug effect, or experience serious toxicity from standard drug dosages. Polymorphisms can be expressed in the phenotype of the extensive metabolizer and the phenotype of the poor metabolizer. Accordingly, genetic polymorphism may lead to allelic protein variants of the CCAT protein in which one or more of the CCAT functions in one population are different from those in another population. The peptides thus allow a target to ascertain a genetic predisposition that can affect treatment modality. Thus, in a ligand-based treatment, polymorphism may give rise to amino terminal extracellular domains and/or other substrate-binding regions that are more or less active in substrate binding, and CCAT activation. Accordingly, substrate dosage would necessarily be modified to maximize the therapeutic effect within a given population containing a polymorphism. As an alternative to genotyping, specific polymorphic peptides could be identified.

[0126] The peptides are also useful for treating a disorder characterized by an absence of, inappropriate, or unwanted expression of the protein. Experimental data as provided in Table 1 indicates expression in human colon tumor tissues. Accordingly, methods for treatment include the use of the CCAT protein or fragments.

### Antibodies

[0127] The present invention provides antibodies specifically bind to CCAT proteins or fragments thereof, peptides, or antigenic portion thereof.

[0128] The invention also provides antibodies that selectively bind to one of the peptides of the present invention, a protein comprising such a peptide, as well as variants and fragments thereof as describe above.

[0129] The antibody of present invention selectively binds a target CCAT when it binds the target domain and does not significantly bind to unrelated proteins. An antibody is still considered to selectively bind a peptide even if it also binds to other proteins that are not substantially homologous with the target peptide so long as such proteins share homology with a fragment or domain of the peptide target of the antibody. In this case, it would be understood that antibody binding to the peptide is still selective despite some degree of cross-reactivity.

[0130] The term “antibody” is used in the broadest sense, and specifically covers monoclonal antibodies (including full length monoclonal antibodies), polyclonal antibodies, multispecific antibodies (e.g., bispecific antibodies), humanized antibody and antibody fragments (e.g., Fab, F(ab′).sub.2 and Fv) so long as they exhibit the desired biological activity. Antibodies (Abs) and immunoglobulins (Igs) are glycoproteins having the same structural characteristics. While antibodies exhibit binding specificity to a specific antigen, immunoglobulins include both antibodies and other antibody-like molecules that lack antigen specificity.

[0131] As used herein, antibodies are usually heterotetrameric glycoproteins of about 150,000 daltons, composed of two identical light (L) chains and two identical heavy (H) chains. Each light chain is linked to a heavy chain by one covalent disulfide bond, while the number of disulfide linkages varies between the heavy chains of different immunoglobulin isotypes. Each heavy and light chain also has regularly spaced intrachain disulfide bridges. Each heavy chain has at one end a variable domain (VH) followed by a number of constant domains. Each light chain has a variable domain at one end (VL) and a constant domain at its other end. The constant domain of the light chain is aligned with the first constant domain of the heavy chain, and the light chain variable domain is aligned with the variable domain of the heavy chain. Particular amino acid residues are believed to form an interface between the light and heavy chain variable domains. Chothia et al., J. Mol. Biol. 186, 651-63 (1985); Novotny and Haber, Proc. Natl. Acad. Sci. USA 82 4592-4596 (1985).

[0132] An “isolated” antibody is one which has been identified and separated and/or recovered from a component of the environment in which is produced. Contaminant components of its production environment are materials that would interfere with diagnostic or therapeutic uses for the antibody, and may include enzymes, hormones, and other proteinaceous or nonproteinaceous solutes. In preferred embodiments, the antibody will be purified as measurable by at least three different methods: 1) to greater than 95% by weight of antibody as determined by the Lowry method, and most preferably more than 99% by weight; 2) to a degree sufficient to obtain at least 15 residues of N-terminal or internal amino acid sequence by use of a spinning cup sequentator; or 3) to homogeneity by SDS-PAGE under reducing or non-reducing conditions using Coomasie blue or, preferably, silver stain. Isolated antibody includes the antibody in situ within recombinant cells since at least one component of the antibody's natural environment will not be present. Ordinarily, however, isolated antibody will be prepared by at least one purification step.

[0133] An “antigenic region” or “antigenic determinant” or an “epitope” includes any protein determinant capable of specific binding to an antibody. This is the site on an antigen to which each distinct antibody molecule binds. Epitopic determinants usually consist of active surface groupings of molecules such as amino acids or sugar side chains and usually have specific three-dimensional structural characteristics, as well as charge characteristics.

[0134] “Antibody specificity,” is an antibody, which has a stronger binding affinity for an antigen from a first subject species than it has for a homologue of that antigen from a second subject species. Normally, the antibody “bind specifically” to a human antigen (i.e., has a binding affinity (Kd) value of no more than about 1×10⁻⁷ M, preferably no more than about 1×10⁻⁸ M and most preferably no more than about 1×10⁻⁹ M) but has a binding affinity for a homologue of the antigen from a second subject species which is at least about 50 fold, or at least about 500 fold, or at least about 1000 fold, weaker than its binding affinity for the human antigen. The antibody can be of any of the various types of antibodies as defined above, but preferably is a humanized or human antibody (Queen et al., U.S. Pat. Nos. 5,530,101, 5, 585,089; 5,693,762; and 6,180,370).

[0135] The present invention provides an “antibody variant,” which refers to an amino acid sequence variant of an antibody wherein one or more of the amino acid residues have been modified. Such variant necessarily have less than 100% sequence identity or similarity with the amino acid sequence having at least 75% amino acid sequence identity or similarity with the amino acid sequence of either the heavy or light chain variable domain of the antibody, more preferably at least 80%, more preferably at least 85%, more preferably at least 90%, and most preferably at least 95%. Since the method of the invention applies equally to both polypeptides, antibodies and fragments thereof, these terms are sometimes employed interchangeably.

[0136] The term “variable” in the context of variable domain of antibodies refers to the fact that certain portions of the variable domains differ extensively in sequence among antibodies and are used in the binding and specificity of each particular antibody for its particular antigen. However, the variability is not evenly distributed through the variable domains of antibodies. It is concentrated in three segments called complementarity determining regions (CDRs) also known as hypervariable regions both in the light chain and the heavy chain variable domains. There are at least two techniques for determining CDRs: (1) an approach based on cross-species sequence variability (i.e., Kabat et al., Sequences of Proteins of Immunological Interest (National Institute of Health, Bethesda, Md. 1987); and (2) an approach based on crystallographic studies of antigen-antibody complexes (Chothia, C. et al. (1989), Nature 342: 877). The more highly conserved portions of variable domains are called the framework (FR). The variable domains of native heavy and light chains each comprise four FR regions, largely adopting a β-Sheet configuration, connected by three CDRs, which form loops connecting, and in some cases forming part of, the β-sheet structure. The CDRs in each chain are held together in close proximity by the FR regions and, with the CDRs from the other chain, contribute to the formation of the antigen-binding site of antibodies (see Kabat et al.) The constant domains are not involved directly in binding an antibody to an antigen, but exhibit various effector functions, such as participation of the antibody in antibody-dependent cellular toxicity.

[0137] The term “antibody fragment” refers to a portion of a full-length antibody, generally the antigen binding or variable region. Examples of antibody fragments include Fab, Fab′, F(ab′)₂ and Fv fragments. Papain digestion of antibodies produces two identical antigen binding fragments, called the Fab fragment, each with a single antigen binding site, and a residual “Fc” fragment, so-called for its ability to crystallize readily. Pepsin treatment yields an F(ab′)₂ fragment that has two antigen binding fragments which are capable of crosslinking antigen, and a residual other fragment (which is termed pFc′). Additional fragments can include diabodies, linear antibodies, single-chain antibody molecules, and multispecific antibodies formed from antibody fragments. As used herein, “functional fragment” with respect to antibodies, refers to Fv, F(ab) and F(ab′)₂ fragments.

[0138] An “Fv” fragment is the minimum antibody fragment that contains a complete antigen recognition and binding site. This region consists of a dimer of one heavy and one light chain variable domain in a tight, non-covalent association (V_{H}-V_{L} dimer). It is in this configuration that the three CDRs of each variable domain interact to define an antigen-binding site on the surface of the V_{H}-V_{L} dimer. Collectively, the six CDRs confer antigen-binding specificity to the antibody. However, even a single variable domain (or half of an Fv comprising only three CDRs specific for an antigen) has the ability to recognize and bind antigen, although at a lower affinity than the entire binding site.

[0139] The Fab fragment [also designated as F(ab)] also contains the constant domain of the light chain and the first constant domain (CH1) of the heavy chain. Fab′ fragments differ from Fab fragments by the addition of a few residues at the carboxyl terminus of the heavy chain CH1 domain including one or more cysteines from the antibody hinge region. Fab′-SH is the designation herein for Fab′ in which the cysteine residue(s) of the constant domains have a free thiol group. F(ab′) fragments are produced by cleavage of the disulfide bond at the hinge cysteines of the F(ab′)₂ pepsin digestion product. Additional chemical couplings of antibody fragments are known to those of ordinary skill in the art.

[0140] The present invention further provides monoclonal antibodies, polyclonal antibodies as well as humanized antibody. In general, to generate antibodies, an isolated peptide is used as an immunogen and is administered to a mammalian organism, such as a rat, rabbit or mouse. The full-length protein, an antigenic peptide fragment or a fusion protein of the CCAT protein can be used. Particularly important fragments are those covering functional domains. Many methods are known for generating and/or identifying antibodies to a given target peptide. Several such methods are described by Harlow, Antibodies, Cold Spring Harbor Press, (1989).

[0141] The term “monoclonal antibody” as used herein refers to an antibody obtained from a population of substantially homogeneous antibodies, i.e., the individual antibodies comprising the population are identical except for possible naturally occurring mutations that may be present in minor amounts. Monoclonal antibodies are highly specific, being directed against a single antigenic site. Furthermore, in contrast to conventional (polyclonal) antibody preparations which typically include different antibodies directed against different determinants (epitopes), each monoclonal antibody is directed against a single determinant on the antigen. In additional to their specificity, the monoclonal antibodies are advantageous in that they are synthesized by the hybridoma culture, uncontaminated by other immunoglobulins. The modifier “monoclonal” antibody indicates the character of the antibody as being obtained from a substantially homogeneous population of antibodies, and is not to be construed as requiring production of the antibody by any particular method. For example, the monoclonal antibodies to be used in accordance with the present invention may be made by the hybridoma method first described by Kohler and Milstein, Nature 256, 495 (1975), or may be made by recombinant methods, e.g., as described in U.S. Pat. No. 4,816,567. The monoclonal antibodies for use with the present invention may also be isolated from phage antibody libraries using the techniques described in Clackson et al. Nature 352: 624-628 (1991), as well as in Marks et al., J. Mol. Biol. 222: 581-597 (1991). For detailed procedures for making a monoclonal antibody, see the Example below.

[0142] “Humanized” forms of non-human (e.g. murine or rabbit) antibodies are chimeric immunoglobulins, immunoglobulin chains or fragments thereof (such as Fv, Fab, Fab′, F(ab′).sub.2 or other antigen-binding subsequences of antibodies) which contain minimal sequence derived from non-human immunoglobulin. For the most part, humanized antibodies are human immunoglobulins (recipient antibody) in which residues from a complementary determining region (CDR) of the recipient are replaced by residues from a CDR of a non-human species (donor antibody) such as mouse, rat or rabbit having the desired specificity, affinity and capacity. In some instances, Fv framework residues of the human immunoglobulin are replaced by corresponding non-human residues. Furthermore, humanized antibody may comprise residues, which are found neither in the recipient antibody nor in the imported CDR or framework sequences. These modifications are made to further refine and optimize antibody performance. In general, the humanized antibody will comprise substantially all of at least one, and typically two, variable domains, in which all or substantially all of the CDR regions correspond to those of a non-human immunoglobulin and all or substantially all of the FR regions are those of a human immunoglobulin consensus sequence. The humanized antibody optimally also will comprise at least a portion of an immunoglobulin constant region (Fc), typically that of a human immunoglobulin. For further details, see: Jones et al., Nature 321, 522-525 (1986); Reichmann et al., Nature 332, 323-327 (1988) and Presta, Curr. Op. Struct. Biol. 2, 593-596 (1992).

[0143] Polyclonal antibodies may be prepared by any known method or modifications of these methods including obtaining antibodies from patients. For example, a complex of an immunogen such as CCAT protein, peptides or fragments thereof and a carrier protein is prepared and an animal is immunized by the complex according to the same manner as that described with respect to the above monoclonal antibody preparation and the description in the Example. A serum or plasma containing the antibody against the protein is recovered from the immunized animal and the antibody is separated and purified. The gamma globulin fraction or the IgG antibodies can be obtained, for example, by use of saturated ammonium sulfate or DEAE Sephadex, or other techniques known to those skilled in the art.

[0144] The antibody titer in the antiserum can be measured according to the same manner as that described above with respect to the supernatant of the hybridoma culture. Separation and purification of the antibody can be carried out according to the same separation and purification method of antibody as that described with respect to the above monoclonal antibody and in the Example.

[0145] The protein used here in as the immunogen is not limited to any particular type of immunogen. In one aspect, antibodies are preferably prepared from regions or discrete fragments of the CCAT proteins. Antibodies can be prepared from any region of the peptide as described herein. In particular, they are selected from a group consisting of SEQ ID NOS: 1332-1501 and fragments of SEQ ID NOS: 1-683. An antigenic fragment will typically comprise at least 8 contiguous amino acid residues. The antigenic peptide can comprise, however, at least 10, 12, 14, 16 or more amino acid residues. Such fragments can be selected on a physical property, such as fragments correspond to regions that are located on the surface of the protein, e.g., hydrophilic regions or can be selected based on sequence uniqueness.

[0146] Antibodies may also be produced by inducing production in the lymphocyte population or by screening antibody libraries or panels of highly specific binding reagents as disclosed in Orlandi et al. (1989; Proc Natl Acad Sci 86:3833-3837) or Winter et al. (1991; Nature 349:293-299). A protein may be used in screening assays of phagemid or B-lymphocyte immunoglobulin libraries to identify antibodies having a desired specificity. Numerous protocols for competitive binding or immunoassays using either polyclonal or monoclonal antibodies with established specificities are well known in the art. Smith G. P., 1991, Curr. Opin. Biotechnol. 2: 668-673.

[0147] The antibodies of the present invention can also be generated using various phage display methods known in the art. In phage display methods, functional antibody domains are displayed on the surface of phage particles which carry the polynucleotide sequences encoding them. In a particular, such phage can be utilized to display antigen-binding domains expressed from a repertoire or combinatorial antibody library (e.g., human or murine). Phage expressing an antigen binding domain that binds the antigen of interest can be selected or identified with antigen, e.g., using labeled antigen or antigen bound or captured to a solid surface or bead. Phage used in these methods are typically filamentous phage including fd and M13 binding domains expressed from phage with Fab, Fv or disulfide stabilized Fv antibody domains recombinantly fused to either the phage gene III or gene VIII protein. Examples of phage display methods that can be used to make the antibodies of the present invention include those disclosed in Brinkman et al., J. Immunol. Methods 182:41-50 (1995); Ames et al., J. Immunol. Methods 184:177-186 (1995); Kettleborough et al., Eur. J. Immunol. 24:952-958 (1994); Persic et al., Gene 187 9-18 (1997); Burton et al., Advances in Immunology 57:191-280 (1994); PCT application No. PCT/GB91/01134; PCT publications WO 90/02809; WO 91/10737; WO 92/01047; WO 92/18619; WO 93/11236; WO 95/15982; WO 95/20401; and U.S. Pat. Nos. 5,698,426; 5,223,409; 5,403,484; 5,580,717; 5,427,908; 5,750,753; 5,821,047; 5,571,698; 5,427,908; 5,516,637; 5,780,225; 5,658,727; 5,733,743 and 5,969,108; each of which is incorporated herein by reference in its entirety.

[0148] Antibody can be also made recombinantly. When using recombinant techniques, the antibody variant can be produced intracellularly, in the periplasmic space, or directly secreted into the medium. If the antibody variant is produced intracellularly, as a first step, the particulate debris, either host cells or lysed fragments, is removed, for example, by centrifugation or ultrafiltration. Carter et al., Bio/Technology 10: 163-167 (1992) describe a procedure for isolating antibodies which are secreted to the periplasmic space of E. coli. Briefly, cell paste is thawed in the presence of sodium acetate (pH 3.5), EDTA, and phenylmethylsulfonylfluoride (PMSF) over about 30 minutes. Cell debris can be removed by centrifugation. Where the antibody variant is secreted into the medium, supernatants from such expression systems are generally first concentrated using a commercially available protein concentration filter, for example, an Amicon or Millipore Pellicon ultrafiltration unit. A protease inhibitor such as PMSF may be included in any of the foregoing steps to inhibit proteolysis and antibiotics may be included to prevent the growth of adventitious contaminants.

[0149] The antibodies or antigen binding fragments may also be produced by genetic engineering. The technology for expression of both heavy and light chain genes in E. coli is the subject the following PCT patent applications; publication number WO 901443, WO901443, and WO 9014424 and in Huse et al., 1989 Science 246:1275-1281. The general recombinant methods are well known in the art.

[0150] The antibody composition prepared from the cells can be purified using, for example, hydroxylapatite chromatography, gel electrophoresis, dialysis, and affinity chromatography, with affinity chromatography being the preferred purification technique. The suitability of protein A as an affinity ligand depends on the species and isotype of any immunoglobulin Fc domain that is present in the antibody. Protein A can be used to purify antibodies that are based on human .delta.1, .delta.2 or .delta.4 heavy chains (Lindmark et al., J. Immunol. Meth. 62: 1-13 (1983)). Protein G is recommended for all mouse isotypes and for human .delta.3 (Guss et al., EMBO J. 5: 1567-1575 (1986)). The matrix to which the affinity ligand is attached is most often agarose, but other matrices are available. Mechanically stable matrices such as controlled pore glass or poly(styrenedivinyl)benzene allow for faster flow rates and shorter processing times than can be achieved with agarose. Where the antibody comprises a CH3 domain, the Bakerbond ABX™ resin (J. T. Baker, Phillipsburg, N.J.) is useful for purification. Other techniques for protein purification such as fractionation on an ion-exchange column, ethanol precipitation, Reverse Phase HPLC, chromatography on silica, chromatography on heparin SEPHAROSE™ chromatography on an anion or cation exchange resin (such as a polyaspartic acid column), chromatofocusing, SDS-PAGE, and ammonium sulfate precipitation are also available depending on the antibody to be recovered.

[0151] Following any preliminary purification step(s), the mixture comprising the antibody of interest and contaminants may be subjected to low pH hydrophobic interaction chromatography using an elution buffer at a pH between about 2.5-4.5, preferably performed at low salt concentrations (e.g., from about 0-0.25M salt).

### Antibody Uses

[0152] The antibodies can be used to isolate one of the proteins of the present invention by standard techniques, such as affinity chromatography or immunoprecipitation. The antibodies can facilitate the purification of the natural protein from cells and recombinantly produced protein expressed in host cells. In addition, such antibodies are useful to detect the presence of one of the proteins of the present invention in cells or tissues to determine the pattern of expression of the protein among various tissues in an organism and over the course of normal development. Experimental data as provided in Table 1 indicate that the CCAT of the present invention are overexpressed in colon tumor tissue. Further, such antibodies can be used to detect protein in situ, in vitro, or in a cell lysate or supernatant in order to evaluate the abundance and pattern of expression. Also, such antibodies can be used to assess abnormal tissue distribution or abnormal expression during development or progression of a biological condition. Antibody detection of circulating fragments of the full length protein can be used to identify turnover.

[0153] Further, the antibodies can be used to assess expression in disease states such as in active stages of the disease or in an individual with a predisposition toward disease related to the protein's function. When a disorder is caused by an inappropriate tissue distribution, developmental expression, level of expression of the protein, or expressed/processed form, the antibody can be prepared against the normal protein. Experimental data as provided in Table 1 indicates expression in human colon tumor tissues. If a disorder is characterized by a specific mutation in the protein, antibodies specific for this mutant protein can be used to assay for the presence of the specific mutant protein.

[0154] The antibodies can also be used to assess normal and aberrant subcellular localization of cells in the various tissues in an organism. Experimental data as provided in Table 1 indicates expression in human colon tumor tissues. The diagnostic uses can be applied, not only in genetic testing, but also in monitoring a treatment modality. Accordingly, where treatment is ultimately aimed at correcting expression level or the presence of aberrant sequence and aberrant tissue distribution or developmental expression, antibodies directed against the protein or relevant fragments can be used to monitor therapeutic efficacy. More detection and diagnostic methods are described in detail below.

[0155] Additionally, antibodies are useful in pharmacogenomic analysis. Thus, antibodies prepared against polymorphic proteins can be used to identify individuals that require modified treatment modalities. The antibodies are also useful as diagnostic tools as an immunological marker for aberrant protein analyzed by electrophoretic mobility, isoelectric point, tryptic peptide digest, and other physical assays known to those in the art.

[0156] The antibodies are also useful for tissue typing. Experimental data as provided in Table 1 indicates expression in human colon tumor tissues. Thus, where a specific protein has been correlated with expression in a specific tissue, antibodies that are specific for this protein can be used to identify a tissue type.

[0157] The antibodies are also useful for inhibiting protein function, for example, blocking the binding of the CCAT peptide to a binding partner such as a substrate or another antibody binding to CCATs. These uses can also be applied in a therapeutic context in which treatment involves inhibiting the protein's function. An antibody can be used, for example, to block binding, thus modulating (agonizing or antagonizing) the peptides activity. Antibodies can be prepared against specific fragments containing sites required for function or against intact protein that is associated with a cell or cell membrane. More therapeutics methods are described in detail below.

[0158] The invention also encompasses kits for using antibodies to detect the presence of a protein in a biological sample. The kit can comprise antibodies such as a labeled or labelable antibody and a compound or agent for detecting protein in a biological sample; means for determining the amount of protein in the sample; means for comparing the amount of protein in the sample with a standard; and instructions for use. Such a kit can be supplied to detect a single protein or epitope or can be configured to detect one of a multitude of epitopes, such as in an antibody detection array. Arrays are described in detail below for nucleic acid arrays and similar methods have been developed for antibody arrays.

### Nucleic Acid Molecules

[0159] The present invention further provides isolated nucleic acid molecules that encode a CCAT peptide or protein of the present invention. Such nucleic acid molecules will consist of, consist essentially of, or comprise a nucleotide sequence that encodes one of the CCAT peptides of the present invention, an allelic variant thereof, or an ortholog or paralog thereof. The nucleic acid molecules and the fragments thereof of the present invention pertains, however, are not to be construed as encompassing fragments that may be disclosed publicly prior to the present invention.

[0160] As used herein, an “isolated” nucleic acid molecule is one that is separated from other nucleic acid present in the natural source of the nucleic acid. Preferably, an “isolated” nucleic acid is free of sequences which naturally flank the nucleic acid (i.e., sequences located at the 5′ and 3′ ends of the nucleic acid) in the genomic DNA of the organism from which the nucleic acid is derived. However, there can be some flanking nucleotide sequences, for example up to about 5 KB, 4 KB, 3 KB, 2 KB, or 1 KB or less, particularly contiguous peptide encoding sequences and peptide encoding sequences within the same gene but separated by introns in the genomic sequence. The important point is that the nucleic acid is isolated from remote and unimportant flanking sequences such that it can be subjected to the specific manipulations described herein such as recombinant expression, preparation of probes and primers, and other uses specific to the nucleic acid sequences.

[0161] Moreover, an “isolated” nucleic acid molecule, such as a transcript/cDNA molecule, can be substantially free of other cellular material, or culture medium when produced by recombinant techniques, or chemical precursors or other chemicals when chemically synthesized. However, the nucleic acid molecule can be fused to other coding or regulatory sequences and still be considered isolated.

[0162] For example, recombinant DNA molecules contained in a vector are considered isolated. Further examples of isolated DNA molecules include recombinant DNA molecules maintained in heterologous host cells or purified (partially or substantially) DNA molecules in solution. Isolated RNA molecules include in vivo or in vitro RNA transcripts of the isolated DNA molecules of the present invention. Isolated nucleic acid molecules according to the present invention further include such molecules produced synthetically.

[0163] The present invention further provides nucleic acid molecules that comprise the nucleotide sequences shown in Table 1, (SEQ ID NOS: 684-1331), or any nucleic acid molecule that encodes a protein provided in Table 1, (SEQ ID NOS: 1-683). A nucleic acid molecule comprises a nucleotide sequence when the nucleotide sequence is at least part of the final nucleotide sequence of the nucleic acid molecule. In such a fashion, the nucleic acid molecule can be only the nucleotide sequence or have additional nucleic acid residues, such as nucleic acid residues that are naturally associated with it or heterologous nucleotide sequences. Such a nucleic acid molecule can have a few additional nucleotides or can comprise several hundred or more additional nucleotides. A brief description of how various types of these nucleic acid molecules can be readily made/isolated is provided below.

[0164] In Table 1, human transcript sequences are provided. As discussed below, some of the non-coding regions, particularly gene regulatory elements such as promoters, are useful for a variety of purposes, e.g. control of heterologous gene expression, target for identifying gene activity modulating compounds, and are particularly claimed as fragments of the genomic sequence provided herein.

[0165] The isolated nucleic acid molecules can encode the mature protein plus additional amino or carboxyl-terminal amino acids, or amino acids interior to the mature peptide (when the mature form has more than one peptide chain, for instance). Such sequences may play a role in processing of a protein from precursor to a mature form, facilitate protein trafficking, prolong or shorten protein half-life or facilitate manipulation of a protein for assay or production, among other things. As generally is the case in situ, the additional amino acids may be processed away from the mature protein by cellular enzymes.

[0166] As mentioned above, the isolated nucleic acid molecules include, but are not limited to, the sequence encoding the CCAT peptide alone, the sequence encoding the mature peptide and additional coding sequences, such as a leader or secretory sequence (e.g., a pre-pro or pro-protein sequence), the sequence encoding the mature peptide, with or without the additional coding sequences, plus additional non-coding sequences, for example introns and non-coding 5′ and 3′ sequences such as transcribed but non-translated sequences that play a role in transcription, mRNA processing (including splicing and polyadenylation signals), ribosome binding and stability of mRNA. In addition, the nucleic acid molecule may be fused to a marker sequence encoding, for example, a peptide that facilitates purification.

[0167] Isolated nucleic acid molecules can be in the form of RNA, such as mRNA, or in the form DNA, including cDNA and genomic DNA obtained by cloning or produced by chemical synthetic techniques or by a combination thereof. The nucleic acid, especially DNA, can be double-stranded or single-stranded. Single-stranded nucleic acid can be the coding strand (sense strand) or the non-coding strand (anti-sense strand).

[0168] The invention further provides nucleic acid molecules that encode fragments of the peptides of the present invention as well as nucleic acid molecules that encode obvious variants of the CCAT proteins of the present invention that are described above. Such nucleic acid molecules may be naturally occurring, such as allelic variants (same locus), paralogs (different locus), and orthologs (different organism), or may be constructed by recombinant DNA methods or by chemical synthesis. Such non-naturally occurring variants may be made by mutagenesis techniques, including those applied to nucleic acid molecules, cells, or organisms. Accordingly, as discussed above, the variants can contain nucleotide substitutions, deletions, inversions and insertions. Variation can occur in either or both the coding and non-coding regions. The variations can produce both conservative and non-conservative amino acid substitutions.

[0169] The present invention further provides non-coding fragments of the nucleic acid molecules provided in Table 1. Preferred non-coding fragments include, but are not limited to, promoter sequences, enhancer sequences, gene modulating sequences and gene termination sequences. Such fragments are useful in controlling heterologous gene expression and in developing screens to identify gene-modulating agents. A promoter can readily be identified as being 5′ to the ATG start site in the genomic sequence.

[0170] A fragment comprises a contiguous nucleotide sequence greater than 12 or more nucleotides. Further, a fragment could at least 30, 40, 50, 100, 250 or 500 nucleotides in length. The length of the fragment will be based on its intended use. For example, the fragment can encode epitope bearing regions of the peptide, or can be useful as DNA probes and primers. Such fragments can be isolated using the known nucleotide sequence to synthesize an oligonucleotide probe. A labeled probe can then be used to screen a cDNA library, genomic DNA library, or mRNA to isolate nucleic acid corresponding to the coding region. Further, primers can be used in PCR reactions to clone specific regions of the gene.

[0171] A probe/primer typically comprises substantially a purified oligonucleotide or oligonucleotide pair. The oligonucleotide typically comprises a region of nucleotide sequence that hybridizes under stringent conditions to at least about 12, 20, 25, 40, 50 or more consecutive nucleotides.

[0172] Orthologs, homologs, and allelic variants can be identified using methods well known in the art. As described in the Peptide Section, these variants comprise a nucleotide sequence encoding a peptide that is typically 60-70%, 70-80%, 80-90%, and more typically at least about 90-95% or more homologous to a nucleotide sequence shown in the Table 1 or a fragment of this sequence. Such nucleic acid molecules can readily be identified as being able to hybridize under moderate to stringent conditions, to a nucleotide sequence shown in Table 1 or a fragment of the sequence. Allelic variants can readily be determined by genetic locus of the encoding gene.

[0173] As used herein, the term “hybridizes under stringent conditions” is intended to describe conditions for hybridization and washing under which nucleotide sequences encoding a peptide at least 60-70% homologous to each other typically remain hybridized to each other. The conditions can be such that sequences at least about 60%, at least about 70%, or at least about 80% or more homologous to each other typically remain hybridized to each other. Such stringent conditions are known to those skilled in the art and can be found in Current Protocols in Molecular Biology, John Wiley & Sons, N.Y. (1989), 6.3.1-6.3.6. One example of stringent hybridization conditions is hybridization in 6× sodium chloride/sodium citrate (SSC) at about 45 C, followed by one or more washes in 0.2×SSC, 0.1% SDS at 50-65 C. Examples of moderate to low stringency hybridization conditions are well known in the art.

### Nucleic Acid Molecule Uses

[0174] The nucleic acid molecules of the present invention are useful for probes, primers, chemical intermediates, and in biological assays. The nucleic acid molecules are useful as a hybridization probe for messenger RNA, transcript/cDNA and genomic DNA to isolate full-length cDNA and genomic clones encoding a peptide described in Table 1 and to isolate cDNA and genomic clones that correspond to variants (alleles, orthologs, etc.) producing the same or related peptides shown in Table 1.

[0175] The probe can correspond to any sequence along the entire length of a nucleic acid molecule provided in Table 1. Accordingly, it could be derived from 5′ noncoding regions, the coding region, and 3′ noncoding regions. However, as discussed, fragments are not to be construed as encompassing fragments disclosed prior to the present invention.

[0176] The nucleic acid molecules are also useful as primers for PCR to amplify any given region of a nucleic acid molecule and are useful to synthesize antisense molecules of desired length and sequence.

[0177] The nucleic acid molecules are also useful for constructing recombinant vectors. Such vectors include expression vectors that express a portion of, or all of, the peptide sequences. Vectors also include insertion vectors, used to integrate into another nucleic acid molecule sequence, such as into the cellular genome, to alter in situ expression of a gene and/or gene product. For example, an endogenous coding sequence can be replaced via homologous recombination with all or part of the coding region containing one or more specifically introduced mutations.

[0178] The nucleic acid molecules are also useful for expressing antigenic portions of the proteins.

[0179] The nucleic acid molecules are also useful as probes for determining the chromosomal positions of the nucleic acid molecules by means of in situ hybridization methods.

[0180] The nucleic acid molecules are also useful in making vectors containing the gene regulatory regions of the nucleic acid molecules of the present invention.

[0181] The nucleic acid molecules are also useful for designing ribozymes corresponding to all, or a part, of the mRNA produced from the nucleic acid molecules described herein. The nucleic acid molecules are also useful for making vectors that express part, or all, of the peptides.

[0182] The nucleic acid molecules are also useful for constructing host cells expressing a part, or all, of the nucleic acid molecules and peptides.

[0183] The nucleic acid molecules are also useful for constructing transgenic animals expressing all, or a part, of the nucleic acid molecules and peptides.

[0184] The nucleic acid molecules are also useful as hybridization probes for determining the presence, level, form and distribution of nucleic acid expression. Experimental data as provided in Table 1 indicate that the CCAT of the present invention are overexpressed in colon tumor tissue. Accordingly, the probes can be used to detect the presence of, or to determine levels of, a specific nucleic acid molecule in cells, tissues, and in organisms. The nucleic acid whose level is determined can be DNA or RNA. Accordingly, probes corresponding to the peptides described herein can be used to assess expression and/or gene copy number in a given cell, tissue, or organism. These uses are relevant for diagnosis of disorders involving an increase or decrease in CCAT protein expression relative to normal results.

[0185] In vitro techniques for detection of mRNA include Northern hybridizations and in situ hybridizations. In vitro techniques for detecting DNA include Southern hybridizations and in situ hybridization.

[0186] Probes can be used as a part of a diagnostic test kit for identifying cells or tissues that express a CCAT protein, such as by measuring a level of a CCAT-encoding nucleic acid in a sample of cells from a subject e.g., mRNA or genomic DNA, or determining if a CCAT gene has been mutated. Experimental data as provided in Table 1 indicate that the CCAT of the present invention are overexpressed in colon tumor tissue. More detection and diagnosis methods are described in detail below.

[0187] Nucleic acid expression assays are useful for drug screening to identify compounds that modulate CCAT nucleic acid expression.

[0188] The invention thus provides a method for identifying a compound that can be used to treat a disorder associated with nucleic acid expression of the CCAT gene, particularly biological and pathological processes that are mediated by the CCAT in cells and tissues that express it. Experimental data as provided in Table 1 indicates expression in human colon tumor tissues. The method typically includes assaying the ability of the compound to modulate the expression of the CCAT nucleic acid and thus identifying a compound that can be used to treat a disorder characterized by undesired CCAT nucleic acid expression. The assays can be performed in cell-based and cell-free systems. Cell-based assays include cells naturally expressing the CCAT nucleic acid or recombinant cells genetically engineered to express specific nucleic acid sequences.

[0189] The assay for CCAT nucleic acid expression can involve direct assay of nucleic acid levels, such as mRNA levels, or on collateral compounds involved in the signal pathway. Further, the expression of genes that are up- or down-regulated in response to the CCAT protein signal pathway can also be assayed. In this embodiment the regulatory regions of these genes can be operably linked to a reporter gene such as luciferase.

[0190] Thus, modulators of CCAT gene expression can be identified in a method wherein a cell is contacted with a candidate compound or agent and the expression of mRNA determined. The level of expression of CCAT mRNA in the presence of the candidate compound or agent is compared to the level of expression of CCAT mRNA in the absence of the candidate compound or agent. The candidate compound can then be identified as a modulator of nucleic acid expression based on this comparison and be used, for example to treat a disorder characterized by aberrant nucleic acid expression. When expression of mRNA is statistically significantly greater in the presence of the candidate compound than in its absence, the candidate compound is identified as a stimulator of nucleic acid expression. When nucleic acid expression is statistically significantly less in the presence of the candidate compound than in its absence, the candidate compound is identified as an inhibitor of nucleic acid expression.

[0191] The invention further provides methods of treatment, with the nucleic acid as a target, using a compound or an agent identified through drug screening as a gene modulator to modulate CCAT nucleic acid expression in cells and tissues that express the CCAT. Experimental data as provided in Table 1 indicate that the CCAT of the present invention are overexpressed in colon tumor tissue. Modulation includes both up-regulation (i.e. activation or agonization) or down-regulation (suppression or antagonization) or nucleic acid expression.

[0192] Alternatively, a modulator for nucleic acid expression can be a small molecule or drug identified using the screening assays described herein as long as the drug or small molecule inhibits the CCAT nucleic acid expression in the cells and tissues that express the protein. Experimental data as provided in Table 1 indicates expression in human colon tumor tissues.

[0193] The nucleic acid molecules are also useful for monitoring the effectiveness of modulating compounds or agents on the expression or activity of the CCAT gene in clinical trials or in a treatment regimen. Thus, the gene expression pattern can serve as a barometer for the continuing effectiveness of treatment with the compound, particularly with compounds to which a patient can develop resistance. The gene expression pattern can also serve as a marker indicative of a physiological response of the affected cells to the compound. Accordingly, such monitoring would allow either increased administration of the compound or the administration of alternative compounds to which the patient has not become resistant. Similarly, if the level of nucleic acid expression falls below a desirable level, administration of the compound could be commensurately decreased.

[0194] The nucleic acid molecules are also useful in diagnostic assays for qualitative changes in CCAT nucleic acid expression, and particularly in qualitative changes that lead to pathology. The nucleic acid molecules can be used to detect mutations in CCAT genes and gene expression products such as mRNA. The nucleic acid molecules can be used as hybridization probes to detect naturally occurring genetic mutations in the CCAT gene and thereby to determine whether a subject with the mutation is at risk for a disorder caused by the mutation. Mutations include deletion, addition, or substitution of one or more nucleotides in the gene, chromosomal rearrangement, such as inversion or transposition, modification of genomic DNA, such as aberrant methylation patterns or changes in gene copy number, such as amplification. Detection of a mutated form of the CCAT gene associated with a dysfunction provides a diagnostic tool for an active disease or susceptibility to disease when the disease results from overexpression, underexpression, or altered expression of a CCAT protein.

[0195] Individuals carrying mutations in the CCAT gene can be detected at the nucleic acid level by a variety of techniques. Genomic DNA can be analyzed directly or can be amplified by using PCR prior to analysis. RNA or cDNA can be used in the same way. In some uses, detection of the mutation involves the use of a probe/primer in a polymerase chain reaction (PCR) (see, e.g. U.S. Pat. Nos. 4,683,195 and 4,683,202), such as anchor PCR or RACE PCR, or, alternatively, in a ligation chain reaction (LCR) (see, e.g., Landegran et al., Science 241:1077-1080 (1988); and Nakazawa et al., PNAS 91:360-364 (1994)), the latter of which can be particularly useful for detecting point mutations in the gene (see Abravaya et al., Nucleic Acids Res. 23:675-682 (1995)). This method can include the steps of collecting a sample of cells from a patient, isolating nucleic acid (e.g., genomic, mRNA or both) from the cells of the sample, contacting the nucleic acid sample with one or more primers which specifically hybridize to a gene under conditions such that hybridization and amplification of the gene (if present) occurs, and detecting the presence or absence of an amplification product, or detecting the size of the amplification product and comparing the length to a control sample. Deletions and insertions can be detected by a change in size of the amplified product compared to the normal genotype. Point mutations can be identified by hybridizing amplified DNA to normal RNA or antisense DNA sequences.

[0196] Alternatively, mutations in a CCAT gene can be directly identified, for example, by alterations in restriction enzyme digestion patterns determined by gel electrophoresis.

[0197] Further, sequence-specific ribozymes (U.S. Pat. No. 5,498,531) can be used to score for the presence of specific mutations by development or loss of a ribozyme cleavage site. Perfectly matched sequences can be distinguished from mismatched sequences by nuclease cleavage digestion assays or by differences in melting temperature.

[0198] Sequence changes at specific locations can also be assessed by nuclease protection assays such as RNase and S1 protection or the chemical cleavage method. Furthermore, sequence differences between a mutant CCAT gene and a wild-type gene can be determined by direct DNA sequencing. A variety of automated sequencing procedures can be utilized when performing the diagnostic assays (Naeve, C. W., (1995) Biotechniques 19:448), including sequencing by mass spectrometry (see, e.g., PCT International Publication No. WO 94/16101; Cohen et al., Adv. Chromatogr. 36:127-162 (1996); and Griffin et al., Appl. Biochem. Biotechnol. 38:147-159 (1993)).

[0199] Other methods for detecting mutations in the gene include methods in which protection from cleavage agents is used to detect mismatched bases in RNA/RNA or RNA/DNA duplexes (Myers et al., Science 230:1242 (1985)); Cotton et al., PNAS 85:4397 (1988); Saleeba et al., Meth. Enzymol. 217:286-295 (1992)), electrophoretic mobility of mutant and wild type nucleic acid is compared (Orita et al., PNAS 86:2766 (1989); Cotton et al., Mutat. Res. 285:125-144 (1993); and Hayashi et al., Genet. Anal. Tech. Appl. 9:73-79 (1992)), and movement of mutant or wild-type fragments in polyacrylamide gels containing a gradient of denaturant is assayed using denaturing gradient gel electrophoresis (Myers et al., Nature 313:495 (1985)). Examples of other techniques for detecting point mutations include selective oligonucleotide hybridization, selective amplification, and selective primer extension.

[0200] The nucleic acid molecules are also useful for testing an individual for a genotype that while not necessarily causing the disease, nevertheless affects the treatment modality. Thus, the nucleic acid molecules can be used to study the relationship between an individual's genotype and the individual's response to a compound used for treatment (pharmacogenomic relationship). Accordingly, the nucleic acid molecules described herein can be used to assess the mutation content of the CCAT gene in an individual in order to select an appropriate compound or dosage regimen for treatment.

[0201] Thus nucleic acid molecules displaying genetic variations that affect treatment provide a diagnostic target that can be used to tailor treatment in an individual. Accordingly, the production of recombinant cells and animals containing these polymorphisms allow effective clinical design of treatment compounds and dosage regimens.

[0202] The nucleic acid molecules are thus useful as antisense constructs to control CCAT gene expression in cells, tissues, and organisms. A DNA antisense nucleic acid molecule is designed to be complementary to a region of the gene involved in transcription, preventing transcription and hence production of CCAT protein. An antisense RNA or DNA nucleic acid molecule would hybridize to the mRNA and thus block translation of mRNA into CCAT protein.

[0203] The nucleic acid of the present invention may also be used to specifically suppress gene expression by methods such as RNA interference (RNAi), which may also include cosuppression and quelling. This and antisense RNA or DNA of gene suppression are well known in the art. A review of this technique is found in Science 288:1370-1372, 2000. RNAi also operates on a post-transcriptional level and is sequence specific, but suppresses gene expression far more efficiently than antisense RNA. RNAi fragments, particularly double-stranded (ds) RNAi, can be also used to generate loss-of-function phenotypes.

[0204] Alternatively, a class of antisense molecules can be used to inactivate mRNA in order to decrease expression of CCAT nucleic acid. Accordingly, these molecules can treat a disorder characterized by abnormal or undesired CCAT nucleic acid expression. This technique involves cleavage by means of ribozymes containing nucleotide sequences complementary to one or more regions in the mRNA that attenuate the ability of the mRNA to be translated. Possible regions include coding regions and particularly coding regions corresponding to the catalytic and other functional activities of the CCAT protein, such as substrate binding.

[0205] The nucleic acid molecules also provide vectors for gene therapy in patients containing cells that are aberrant in CCAT gene expression. Thus, recombinant cells, which include the patient's cells that have been engineered ex vivo and returned to the patient, are introduced into an individual where the cells produce the desired CCAT protein to treat the individual.

[0206] The invention also encompasses kits for detecting the presence of a CCAT nucleic acid in a biological sample. Experimental data as provided in Table 1 indicate that the CCAT of the present invention are overexpressed in colon tumor tissue. For example, the kit can comprise reagents such as a labeled or labelable nucleic acid or agent capable of detecting CCAT nucleic acid in a biological sample; means for determining the amount of CCAT nucleic acid in the sample; and means for comparing the amount of CCAT nucleic acid in the sample with a standard. The compound or agent can be packaged in a suitable container. The kit can further comprise instructions for using the kit to detect CCAT protein mRNA or DNA.

### Vectors/Host Cells

[0207] The invention also provides vectors containing the nucleic acid molecules described herein. The term “vector” refers to a vehicle, preferably a nucleic acid molecule, which can transport the nucleic acid molecules. When the vector is a nucleic acid molecule, the nucleic acid molecules are covalently linked to the vector nucleic acid. With this aspect of the invention, the vector includes a plasmid, single or double stranded phage, a single or double stranded RNA or DNA viral vector, or artificial chromosome, such as a BAC, PAC, YAC, OR MAC.

[0208] A vector can be maintained in the host cell as an extrachromosomal element where it replicates and produces additional copies of the nucleic acid molecules. Alternatively, the vector may integrate into the host cell genome and produce additional copies of the nucleic acid molecules when the host cell replicates.

[0209] The invention provides vectors for the maintenance (cloning vectors) or vectors for expression (expression vectors) of the nucleic acid molecules. The vectors can function in prokaryotic or eukaryotic cells or in both (shuttle vectors).

[0210] Expression vectors contain cis-acting regulatory regions that are operably linked in the vector to the nucleic acid molecules such that transcription of the nucleic acid molecules is allowed in a host cell. The nucleic acid molecules can be introduced into the host cell with a separate nucleic acid molecule capable of affecting transcription. Thus, the second nucleic acid molecule may provide a trans-acting factor interacting with the cis-regulatory control region to allow transcription of the nucleic acid molecules from the vector. Alternatively, a trans-acting factor may be supplied by the host cell. Finally, a trans-acting factor can be produced from the vector itself. It is understood, however, that in some embodiments, transcription and/or translation of the nucleic acid molecules can occur in a cell-free system.

[0211] The regulatory sequences to which the nucleic acid molecules described herein can be operably linked include promoters for directing mRNA transcription. These include, but are not limited to, the left promoter from bacteriophage, the lac, TRP, and TAC promoters from E. coli, the early and late promoters from SV40, the CMV immediate early promoter, the adenovirus early and late promoters, and retrovirus long-terminal repeats.

[0212] In addition to control regions that promote transcription, expression vectors may also include regions that modulate transcription, such as repressor binding sites and enhancers. Examples include the SV40 enhancer, the cytomegalovirus immediate early enhancer, polyoma enhancer, adenovirus enhancers, and retrovirus LTR enhancers.

[0213] In addition to containing sites for transcription initiation and control, expression vectors can also contain sequences necessary for transcription termination and, in the transcribed region a ribosome binding site for translation. Other regulatory control elements for expression include initiation and termination codons as well as polyadenylation signals. The person of ordinary skill in the art would be aware of the numerous regulatory sequences that are useful in expression vectors. Such regulatory sequences are described, for example, in Sambrook et al., Molecular Cloning: A Laboratory Manual. 3rd. ed., Cold Spring Harbor Laboratory Press, Cold Spring Harbor, N.Y., (2001).

[0214] A variety of expression vectors can be used to express a nucleic acid molecule. Such vectors include chromosomal, episomal, and virus-derived vectors, for example vectors derived from bacterial plasmids, from bacteriophage, from yeast episomes, from yeast chromosomal elements, including yeast artificial chromosomes, from viruses such as baculoviruses, papovaviruses such as SV40, Vaccinia viruses, adenoviruses, poxviruses, pseudorabies viruses, and retroviruses. Vectors may also be derived from combinations of these sources such as those derived from plasmid and bacteriophage genetic elements, e.g. cosmids and phagemids. Appropriate cloning and expression vectors for prokaryotic and eukaryotic hosts are described in Sambrook et al., Molecular Cloning: A Laboratory Manual. 3rd. ed., Cold Spring Harbor Laboratory Press, Cold Spring Harbor, N.Y., (2001).

[0215] The regulatory sequence may provide constitutive expression in one or more host cells (i.e. tissue specific) or may provide for inducible expression in one or more cell types such as by temperature, nutrient additive, or exogenous factor such as a hormone or other ligand. A variety of vectors providing for constitutive and inducible expression in prokaryotic and eukaryotic hosts are well known to those of ordinary skill in the art.

[0216] The nucleic acid molecules can be inserted into the vector nucleic acid by well-known methodologies. Generally, the DNA sequence that will ultimately be expressed is joined to an expression vector by cleaving the DNA sequence and the expression vector with one or more restriction enzymes and then ligating the fragments together. Procedures for restriction enzyme digestion and ligation are well known to those of ordinary skill in the art.

[0217] The vector containing the appropriate nucleic acid molecule can be introduced into an appropriate host cell for propagation or expression using well-known techniques. Bacterial cells include, but are not limited to, E. coli, Streptomyces, and Salmonella typhimurium. Eukaryotic cells include, but are not limited to, yeast, insect cells such as Drosophila, animal cells such as COS and CHO cells, and plant cells.

[0218] As described herein, it may be desirable to express the peptide as a fusion protein. Accordingly, the invention provides fusion vectors that allow for the production of the peptides. Fusion vectors can increase the expression of a recombinant protein; increase the solubility of the recombinant protein, and aid in the purification of the protein by acting for example as a ligand for affinity purification. A proteolytic cleavage site may be introduced at the junction of the fusion moiety so that the desired peptide can ultimately be separated from the fusion moiety. Proteolytic enzymes include, but are not limited to, factor Xa, thrombin, and enteroenzyme. Typical fusion expression vectors include pGEX (Smith et al., Gene 67:31-40 (1988)), pMAL (New England Biolabs, Beverly, Mass.) and pRIT5 (Pharmacia, Piscataway, N.J.) which fuse glutathione S-transferase (GST), maltose E binding protein, or protein A, respectively, to the target recombinant protein. Examples of suitable inducible non-fusion E. coli expression vectors include pTrc (Amann et al., Gene 69:301-315 (1988)) and pET 11d (Studier et al., Gene Expression Technology: Methods in Enzymology 185:60-89 (1990)). Recombinant protein expression can be maximized in host bacteria by providing a genetic background wherein the host cell has an impaired capacity to proteolytically cleave the recombinant protein. (Gottesman, S., Gene Expression Technology: Methods in Enzymology 185, Academic Press, San Diego, Calif. (1990) 119-128). Alternatively, the sequence of the nucleic acid molecule of interest can be altered to provide preferential codon usage for a specific host cell, for example E. coli. (Wada et al., Nucleic Acids Res. 20:2111-2118 (1992)).

[0219] The nucleic acid molecules can also be expressed by expression vectors that are operative in yeast. Examples of vectors for expression in yeast e.g., S. cerevisiae include pYepSec1 (Baldari, et al., EMBO J. 6:229-234 (1987)), pMFa (Kurjan et al., Cell 30:933-943 (1982)), pJRY88 (Schultz et al., Gene 54:113-123 (1987)), and pYES2 (Invitrogen Corporation, San Diego, Calif.).

[0220] The nucleic acid molecules can also be expressed in insect cells using, for example, baculovirus expression vectors. Baculovirus vectors available for expression of proteins in cultured insect cells (e.g., Sf 9 cells) include the pAc series (Smith et al., Mol. Cell. Biol. 3:2156-2165 (1983)) and the pVL series (Lucklow et al., Virology 170:31-39 (1989)).

[0221] In certain embodiments of the invention, the nucleic acid molecules described herein are expressed in mammalian cells using mammalian expression vectors. Examples of mammalian expression vectors include pCDM8 (Seed, B. Nature 329:840 (1987)) and pMT2PC (Kaufman et al., EMBO J. 6:187-195 (1987)).

[0222] The expression vectors listed herein are provided by way of example only of the well-known vectors available to those of ordinary skill in the art that would be useful to express the nucleic acid molecules. The person of ordinary skill in the art would be aware of other vectors suitable for maintenance propagation or expression of the nucleic acid molecules described herein. These are found for example in Sambrook, J., Fritsh, E. F., and Maniatis, T. Molecular Cloning: A Laboratory Manual. 3rd, ed., Cold Spring Harbor Laboratory, Cold Spring Harbor Laboratory Press, Cold Spring Harbor, N.Y., 2001.

[0223] The invention also encompasses vectors in which the nucleic acid sequences described herein are cloned into the vector in reverse orientation, but operably linked to a regulatory sequence that permits transcription of antisense RNA. Thus, an antisense transcript can be produced to all, or to a portion, of the nucleic acid molecule sequences described herein, including both coding and non-coding regions. Expression of this antisense RNA is subject to each of the parameters described above in relation to expression of the sense RNA (regulatory sequences, constitutive or inducible expression, tissue-specific expression).

[0224] The invention also relates to recombinant host cells containing the vectors described herein. Host cells therefore include prokaryotic cells, lower eukaryotic cells such as yeast, other eukaryotic cells such as insect cells, and higher eukaryotic cells such as mammalian cells.

[0225] The recombinant host cells are prepared by introducing the vector constructs described herein into the cells by techniques readily available to the person of ordinary skill in the art. These include, but are not limited to, calcium phosphate transfection, DEAE-dextran-mediated transfection, cationic lipid-mediated transfection, electroporation, transduction, infection, lipofection, and other techniques such as those found in Sambrook, et al. (Molecular Cloning: A Laboratory Manual. 3rd, ed., Cold Spring Harbor Laboratory, Cold Spring Harbor Laboratory Press, Cold Spring Harbor, N.Y., 2001).

[0226] Host cells can contain more than one vector. Thus, different nucleotide sequences can be introduced on different vectors of the same cell. Similarly, the nucleic acid molecules can be introduced either alone or with other nucleic acid molecules that are not related to the nucleic acid molecules such as those providing trans-acting factors for expression vectors. When more than one vector is introduced into a cell, the vectors can be introduced independently, co-introduced or joined to the nucleic acid molecule vector.

[0227] In the case of bacteriophage and viral vectors, these can be introduced into cells as packaged or encapsulated virus by standard procedures for infection and transduction. Viral vectors can be replication-competent or replication-defective. In the case in which viral replication is defective, replication will occur in host cells providing functions that complement the defects.

[0228] Vectors generally include selectable markers that enable the selection of the subpopulation of cells that contain the recombinant vector constructs. The marker can be contained in the same vector that contains the nucleic acid molecules described herein or may be on a separate vector. Markers include tetracycline or ampicillin-resistance genes for prokaryotic host cells and dihydrofolate reductase or neomycin resistance for eukaryotic host cells. However, any marker that provides selection for a phenotypic trait will be effective.

[0229] While the mature proteins can be produced in bacteria, yeast, mammalian cells, and other cells under the control of the appropriate regulatory sequences, cell-free transcription and translation systems can also be used to produce these proteins using RNA derived from the DNA constructs described herein.

[0230] Where secretion of the peptide is desired, which may be difficult to achieve with multi-transmembrane domain containing proteins such as CCATs, appropriate secretion signals are incorporated into the vector. The signal sequence can be endogenous to the peptides or heterologous to these peptides.

[0231] Where the peptide is not secreted into the medium, which is typically the case with CCATs, the protein can be isolated from the host cell by standard disruption procedures, including freeze thaw, sonication, mechanical disruption, use of lysing agents and the like. The peptide can then be recovered and purified by well-known purification methods including ammonium sulfate precipitation, acid extraction, anion or cationic exchange chromatography, phosphocellulose chromatography, hydrophobic-interaction chromatography, affinity chromatography, hydroxylapatite chromatography, lectin chromatography, or high performance liquid chromatography.

[0232] It is also understood that depending upon the host cell in recombinant production of the peptides described herein, the peptides can have various glycosylation patterns, depending upon the cell, or maybe non-glycosylated as when produced in bacteria. In addition, the peptides may include an initial modified methionine in some cases as a result of a host-mediated process.

### Uses of Vectors and Host Cells

[0233] The recombinant host cells expressing the peptides described herein have a variety of uses. First, the cells are useful for producing a CCAT protein or peptide that can be further purified to produce desired amounts of CCAT protein or fragments. Thus, host cells containing expression vectors are useful for peptide production.

[0234] Host cells are also useful for conducting cell-based assays involving the CCAT protein or CCAT protein fragments, such as those described above as well as other formats known in the art. Thus, a recombinant host cell expressing a native CCAT protein is useful for assaying compounds that stimulate or inhibit CCAT protein function.

[0235] Host cells are also useful for identifying CCAT protein mutants in which these functions are affected. If the mutants naturally occur and give rise to a pathology, host cells containing the mutations are useful to assay compounds that have a desired effect on the mutant CCAT protein (for example, stimulating or inhibiting function) which may not be indicated by their effect on the native CCAT protein.

[0236] Genetically engineered host cells can be further used to produce non-human transgenic animals. A transgenic animal is preferably a mammal, for example a rodent, such as a rat or mouse, in which one or more of the cells of the animal include a transgene. A transgene is exogenous DNA which is integrated into the genome of a cell from which a transgenic animal develops and which remains in the genome of the mature animal in one or more cell types or tissues of the transgenic animal. These animals are useful for studying the function of a CCAT protein and identifying and evaluating modulators of CCAT protein activity. Other examples of transgenic animals include non-human primates, sheep, dogs, cows, goats, chickens, and amphibians.

[0237] A transgenic animal can be produced by introducing nucleic acid into the male pronuclei of a fertilized oocyte, e.g., by microinjection, retroviral infection, and allowing the oocyte to develop in a pseudopregnant female foster animal. Any of the CCAT protein nucleotide sequences can be introduced as a transgene into the genome of a non-human animal, such as a mouse.

[0238] Any of the regulatory or other sequences useful in expression vectors can form part of the transgenic sequence. This includes intronic sequences and polyadenylation signals, if not already included. A tissue-specific regulatory sequence(s) can be operably linked to the transgene to direct expression of the CCAT protein to particular cells.

[0239] Methods for generating transgenic animals via embryo manipulation and microinjection, particularly animals such as mice, have become conventional in the art and are described, for example, in U.S. Pat. Nos. 4,736,866 and 4,870,009, both by Leder et al., U.S. Pat. No. 4,873,191 by Wagner et al. and in Hogan, B., Manipulating the Mouse Embryo, (Cold Spring Harbor Laboratory Press, Cold Spring Harbor, N.Y., 1986). Similar methods are used for production of other transgenic animals. A transgenic founder animal can be identified based upon the presence of the transgene in its genome and/or expression of transgenic mRNA in tissues or cells of the animals. A transgenic founder animal can then be used to breed additional animals carrying the transgene. Moreover, transgenic animals carrying a transgene can further be bred to other transgenic animals carrying other transgenes. A transgenic animal also includes animals in which the entire animal or tissues in the animal have been produced using the homologously recombinant host cells described herein.

[0240] In another embodiment, transgenic non-human animals can be produced which contain selected systems that allow for regulated expression of the transgene. One example of such a system is the cre/loxP recombinase system of bacteriophage P1. For a description of the cre/loxP recombinase system, see, e.g., Lakso et al. PNAS 89:6232-6236 (1992). Another example of a recombinase system is the FLP recombinase system of S. cerevisiae (O'Gorman et al. Science 251:1351-1355 (1991). If a cre/loxP recombinase system is used to regulate expression of the transgene, animals containing transgenes encoding both the Cre recombinase and a selected protein is required. Such animals can be provided through the construction of “double” transgenic animals, e.g., by mating two transgenic animals, one containing a transgene encoding a selected protein and the other containing a transgene encoding a recombinase.

[0241] Clones of the non-human transgenic animals described herein can also be produced according to the methods described in Wilmut, I. et al. Nature 385:810-813 (1997) and PCT International Publication Nos. WO 97/07668 and WO 97/07669. In brief, a cell, e.g., a somatic cell, from the transgenic animal can be isolated and induced to exit the growth cycle and enter Go phase. The quiescent cell can then be fused, e.g., through the use of electrical pulses, to an enucleated oocyte from an animal of the same species from which the quiescent cell is isolated. The reconstructed oocyte is then cultured such that it develops to morula or blastocyst and then transferred to pseudopregnant female foster animal. The offspring born of this female foster animal will be a clone of the animal from which the cell, e.g., the somatic cell, is isolated.

[0242] Transgenic animals containing recombinant cells that express the peptides described herein are useful to conduct the assays described herein in an in vivo context. Accordingly, the various physiological factors that are present in vivo and that could effect substrate binding, CCAT protein activation, and signal transduction, may not be evident from in vitro cell-free or cell-based assays. Accordingly, it is useful to provide non-human transgenic animals to assay in vivo CCAT protein function, including substrate interaction, the effect of specific mutant CCAT proteins on CCAT protein function and substrate interaction, and the effect of chimeric CCAT proteins. It is also possible to assess the effect of null mutations, that is, mutations that substantially or completely eliminate one or more CCAT protein functions.

### Detection and Diagnosis

[0243] The present invention provides a method for detecting CCAT nucleic acids, proteins, peptides and fragments thereof that are differentially expressed in colon diseases in a test sample, preferably in a biological sample.

[0244] The present invention further provides a method for diagnosing the colon diseases, by detecting the nucleic acids, proteins, peptides and fragments thereof. The further embodiment includes but is not limited to, monitoring the disease prognosis (recurrence), diagnosing disease stage, preventing the disease and treating the disease. While the protein is overexpressed, the expression of CCAT is preferably greater than about 20%, or preferably greater than about 30%, and most preferably greater than about 50% or more of normal colon sample; or at a level that is at least two fold, and preferably at least five fold, greater than the level of expression in control samples, as determined using a representative assay provided herein. While the protein is underexpressed, the expression of CCAT is preferably less than about 20%, or preferably less than 30%, and most preferably less than about 50% or less of the normal colon sample; or at a level that is at least 0.5 fold, and preferably at least 0.2 fold less than the level of the expression in control samples, as determined using a representative assay provided herein.

[0245] As used herein, a “biological sample” can be collected from tissues, blood, sera, cell lines or biological fluids. In one embodiment, a biological sample comprises cells or tissues suspected of having diseases (e.g., cells obtained from a biopsy).

[0246] As used herein, “biological fluids” are plasma, interstitial fluid, urine, cerebrospinal fluid, and the like, containing cells or proteins including shed proteins.

[0247] As used herein, a “differential level” is defined as the level of CCAT proteins or nucleic acids in a test sample either above or below the level of the ones in control samples, wherein the level of control samples is obtained either from a control cell line, a normal tissue or body fluids, or combination thereof, from a healthy subject.

[0248] As used herein, a “subject” can be a mammalian subject or non mammalian subject, preferably, a mammalian subject. A mammalian subject can be human or non-human, preferably human. A healthy subject is defined as a subject without detectable diseases or associated diseases by using conventional diagnostic methods.

[0249] As used herein the “diseases” include diseases and associated diseases. Preferably, the colon disease is color cancer.

[0250] As used herein, “cancer” includes epithelial-cell related cancers, for example pancreatic, lung, colon, prostate, ovarian, breast as well as bladder renal.

### Nucleic Acid Detections

[0251] The present invention is not limited to the detection methods described above. Any suitable detection method that allows for the specific detection of colon disease cells, tissues or organs may be utilized. For example, in some embodiments, the expression of RNA corresponding to a CCAT gene is detected by hybridization to an antisense oligonucleotide (described below). In other embodiments, RNA expression is detected by hybridization assays such as Northern blots, RNase assays, reverse transcriptase PCR amplification, and the like. One preferred detection method is using RT PCR by using TAQMAN technology (ABI, Foster City, Calif.).

[0252] In another embodiment, the present invention provides a method for diagnosing or detecting colon diseases in a subject comprising: determining the level of one or more CCAT nucleic acid molecules or any fragment(s) thereof in a test sample from said subject, wherein said CCAT nucleic acid molecule(s) comprises a sequence selected from a group consisting of SEQ ID NOS: 684-1331 and a combination thereof; wherein a differential level of said CCAT nucleic acid molecule(s) relative to the level of said nucleic acid molecule(s) in a test sample from a healthy subject, or the level established for a healthy subject, is indicative of colon diseases.

[0253] In another embodiment, the detecting or diagnosing method comprises determining level of differential expression of 2, 4, 8, 10, 20 or more nucleic acid molecules, preferably, the nucleic acid molecules comprise or consists of a sequence selected from the group consisting of SEQ ID NOS: 684-1331 and combination thereof.

[0254] In further embodiments of the present invention, the presence of particular sequences in the genome of a subject is detected. Such sequences include CCAT sequences associated with abnormal expression of CCAT (e.g., overexpression or expression at a physiological inappropriate time). These sequences include polymorphisms, including polymorphisms in the transcribed sequence (e.g., that effect CCAT processing and/or translation) and regulatory sequences such as promoters, enhances, repressors, and the like. These sequences may also include polymorphisms in genes or control sequences associated with factors that affect expression such as transcription factors, and the like. Any suitable method for detecting and/or identifying these sequences is within the scope of the present invention including, but not limited to, nucleic acid sequencing, hybridization assays (e.g., Southern blotting), single nucleotide polymorphism assays (See e.g., U.S. Pat. No. 5,994,069, herein incorporated by reference in its entirety), and the like.

### Protein Detections

[0255] The present invention provides methods for diagnosing or detecting the differential presence of CCAT protein. In some embodiments (e.g., where CCATs are overexpressed in diseased cells), CCAT proteins are detected directly. In other embodiments (e.g., where the presence of a CCATs are underexpressed), CCAT to the disease antigens are detected non-existence.

[0256] The diagnostic methods of the present invention find utility in the diagnosis and characterization of diseases. For example, the presence of an antibody to a specific protein may be indicative of a cancer or disease. In addition, certain CCAT may be indicative of a specific stage or sub-type of the same cancer or disease.

[0257] The information obtained is also used to determine prognosis and appropriate course of treatment. For example, it is contemplated that individuals with a specific CCAT expression or stage of colon diseases may respond differently to a given treatment that individuals lacking the CCAT expression. The information obtained from the diagnostic methods of the present invention thus provides for the personalization of diagnosis and treatment.

[0258] In one embodiment, the present invention provides a method for monitoring colon disease treatment in a subject comprising: determining the level of one or more CCAT proteins or any fragment(s) or peptide(s) thereof in a test sample from said subject, wherein said CCAT protein(s) comprises a sequence selected from a group consisting of SEQ ID NOS: 1-683, SEQ ID NOS: 1332-1501 and a combination thereof; wherein an level of said CCAT protein(s) similar to the level of said protein(s) in a test sample from a healthy subject, or the level established for a healthy subject, is indicative of successful treatment.

[0259] In another embodiment, the present invention provides a method for diagnosing recurrence of colon diseases following successful treatment in a subject comprising: determining the level of one or more CCAT proteins or any fragment(s) or peptide(s) thereof in a test sample from said subject, wherein said CCAT protein(s) comprises a sequence selected from a group consisting of SEQ ID NOS: 1-683, SEQ ID NOS: 1332-1501 or a combination thereof; wherein a changed level of said CCAT protein(s) relative to the level of said protein(s) in a test sample from a healthy subject, or the level established for a healthy subject, is indicative of recurrence of colon diseases.

[0260] In yet another embodiment, the present invention provides a method for diagnosing or detecting colon diseases in a subject comprising: determining the level of one or more CCAT proteins or any fragment(s) or peptides thereof in a test sample from said subject, wherein said CCAT protein(s) comprises a sequence selected from a group consisting of SEQ ID NOS: 1-683, SEQ ID NOS: 1332-1501 and a combination thereof; wherein a differential level of said CCAT protein(s) relative to the level of said protein(s) in a test sample from a healthy subject, or the level established for a healthy subject, is indicative of colon diseases.

[0261] The detecting or diagnosing method comprises determining level of differential expression of 2, 4, 8, 10, 20 or more proteins, preferably, the proteins are selected from a group consisting of SEQ ID NOS: 1-683 and combination thereof.

[0262] Further, the detecting or diagnosing method comprises determining level of differential expression of 5, 10, 15, 20, 40, 60, 80, 100 or more CCAT peptides, preferably the peptides are selected from the group consisting of SEQ ID NOS: 1332-1501 and combination thereof.

[0263] These methods are also useful for diagnosing diseases that show differential protein expression. As describe earlier, normal, control or standard values or level established from a healthy subject for protein expression are established by combining body fluids or tissue, cell extracts taken from a normal healthy mammalian or human subject with specific antibodies to a protein under conditions for complex formation. Standard values for complex formation in normal and diseased tissues are established by various methods, often photometric means. Then complex formation as it is expressed in a subject sample is compared with the standard values. Deviation from the normal standard and toward the diseased standard provides parameters for disease diagnosis or prognosis while deviation away from the diseased and toward the normal standard may be used to evaluate treatment efficacy.

[0264] In yet another embodiment, the present invention provides a detection or diagnostic method of CCATs by using LC/MS. The proteins from cells are prepared by methods known in the art (R. Aebersold Nature Biotechnology Volume 21 Number 6 Jun. 2003). The differential expression of proteins in disease and healthy samples are quantitated using Mass Spectrometry and ICAT (Isotope Coded Affinity Tag) labeling, which is known in the art. ICAT is an isotope label technique that allows for discrimination between two populations of proteins, such as a healthy and a disease sample. The LC/MS spectra are collected for the labeled samples. The raw scans from the LC/MS instrument are subjected to peak detection and noise reduction software. Filtered peak lists are then used to detect ‘features’ corresponding to specific peptides from the original sample(s). Features are characterized by their mass/charge, charge, retention time, isotope pattern and intensity.

[0265] The intensity of a peptide present in both healthy and disease samples can be used to calculate the differential expression, or relative abundance, of the peptide. The intensity of a peptide found exclusively in one sample can be used to calculate a theoretical expression ratio for that peptide (singleton). Expression ratios are calculated for each peptide of each replicate of the experiment (Table 1). Thus overexpression or under expression of CCAT protein or peptide are similar to the expression pattern in Table 1 in a test subject indicates the likelihood of having colon diseases or diseases associated with colon.

[0266] Immunological methods for detecting and measuring complex formation as a measure of protein expression using either specific polyclonal or monoclonal antibodies are known in the art. Examples of such techniques include enzyme-linked immunosorbent assays (ELISAs), radioimmunoassays (RIAs), fluorescence-activated cell sorting (FACS) and antibody arrays. Such immunoassays typically involve the measurement of complex formation between the protein and its specific antibody. These assays and their quantitation against purifed, labeled standards are well known in the art (Ausubel, supra, unit 10.1-10.6). A two-site, monoclonal-based immunoassay utilizing antibodies reactive to two non-interfering epitopes is preferred, but a competitive binding assay may be employed (Pound (1998) Immunochemical Protocols, Humana Press, Totowa N.J.). More immunological detections are described in the sections below.

### Antibody Detections

[0267] Antibodies are useful to detect the presence of one of the proteins or fragments thereof, peptides of the present invention in cells or tissues to determine the pattern of expression of the proteins among various tissues in an organism and over the course of normal development.

[0268] Further, as described above, the antibodies can be used to assess expression in disease states such as in active stages of the disease or in an individual with a predisposition toward disease related to the protein's function. The antibodies can also be used to assess normal and aberrant subcellular localization of cells in the various tissues in an organism.

[0269] Detection on a protein by an antibody can be facilitated by coupling (i.e., physically linking) the antibody to a detectable substance. Examples of detectable substances include various enzymes, prosthetic groups, fluorescent materials, luminescent materials, bioluminescent materials, and radioactive materials (see below). The antibodies may also be useful in diagnostic assays, e.g., for detecting expression of an antigen, for example CCAT protein, peptide or fragements thereof, in specific cells, tissues, blood, serum or body fluids.

[0270] For diagnostic applications, the antibody or its variant typically will be labeled with a detectable moiety. Numerous labels are available which can be generally grouped into the following categories:

[0271] (a) Radioisotopes, such as ³⁶S, ¹⁴C, ¹²⁵I, ³H, and ¹³¹I. The antibody variant can be labeled with the radioisotope using the techniques described in Current Protocols in Immunology, vol 1-2, Coligen et al., Ed., Wiley-Interscience, New York, Pubs. (1991) for example and radioactivity can be measured using scintillation counting.

[0272] (b) Fluorescent labels such as rare earth chelates (europium chelates) or fluorescein and its derivatives, rhodamine and its derivatives, dansyl, Lissamine, phycoerythrin and Texas Red are available. The fluorescent labels can be conjugated to the antibody variant using the techniques disclosed in Current Protocols in Immunology, supra, for example. Fluorescence can be quantified using a fluorimeter.

[0273] (c) Various enzyme-substrate labels are available and U.S. Pat. Nos. 4,275,149, and 4,318,980 provides a review of some of these. The enzyme generally catalyzes a chemical alteration of the chromogenic substrate which can be measured using various techniques. For example, the enzyme may catalyze a color change in a substrate, which can be measured spectrophotometrically. Alternatively, the enzyme may alter the fluorescence or chemiluminescence of the substrate. Techniques for quantifying a change in fluorescence are described above. The chemiluminescent substrate becomes electronically excited by a chemical reaction and may then emit light which can be measured (using a chemiluminometer, for example) or donates energy to a fluorescent acceptor. Examples of enzymatic labels include luciferases (e.g., firefly luciferase and bacterial luciferase; U.S. Pat. No. 4,737,456), luciferin, 2,3-dihydrophthalazinediones, malate dehydrogenase, urease, peroxidase such as horseradish peroxidase (HRPO), alkaline phosphatase, β-galactosidase, glucoamylase, lysozyme, saccharide oxidases (e.g., glucose oxidase, galactose oxidase, and glucose-6-phosphate dehydrogenase), heterocyclic oxidases (such as uricase and xanthine oxidase), lactoperoxidase, microperoxidase, and the like. Techniques for conjugating enzymes to antibodies are described in O'Sullivan et al., Methods for the Preparation of Enzyme-Antibody Conjugates for Use in Enzyme Immunoassay, in Methods in Enzyme. (Ed. J. Langone & H. Van Vunakis), Academic press, New York, 73: 147-166 (1981).

[0274] Sometimes, the label is indirectly conjugated with the antibody. The skilled artisan will be aware of various techniques for achieving this. For example, the antibody can be conjugated with biotin and any of the three broad categories of labels mentioned above can be conjugated with avidin, or vice versa. Biotin binds selectively to avidin and thus, the label can be conjugated with the antibody in this indirect manner. Alternatively, to achieve indirect conjugation of the label with the antibody, the antibody is conjugated with a small hapten (e.g. digloxin) and one of the different types of labels mentioned above is conjugated with an anti-hapten antibody (e.g. anti-digloxin antibody). Thus, indirect conjugation of the label with the antibody can be achieved.

[0275] In another embodiment of the invention, the antibody needs not be labeled, and the presence thereof can be detected using a labeled antibody, which binds to the antibody.

[0276] The antibodies of the present invention may be employed in any known assay method, such as competitive binding assays, direct and indirect sandwich assays, and immunoprecipitation assays. Zola, Monoclonal Antibodies: A Manual of Techniques, pp. 147-158 (CRC Press, Inc. 1987).

[0277] The biological samples can then be tested directly for the presence of CCAT by assays (e.g., ELISA or radioimmunoassay) and format (e.g., microwells, dipstick (e.g., as described in International Patent Publication WO 93/03367), etc). Alternatively, proteins in the sample can be size separated (e.g., by polyacrylamide gel electrophoresis (PAGE)), in the presence or absence of sodium dodecyl sulfate (SDS), and the presence of CCAT detected by immunoblotting (e.g., Western blotting). Immunoblotting techniques are generally more effective with antibodies generated against a peptide corresponding to an epitope of a protein, and hence, are particularly suited to the present invention.

[0278] Antibody binding is detected by techniques known in the art (e.g., radioimmunoassay, ELISA (enzyme-linked immunosorbant assay), “sandwich” immunoassays, immunoradiometric assays, gel diffusion precipitation reactions, immunodiffusion assays, in situ immunoassays (e.g., using colloidal gold, enzyme or radioisotope labels, for example), Western blots, precipitation reactions, agglutination assays (e.g., gel agglutination assays, hemagglutination assays, etc.), complement fixation assays, immunofluorescence assays, protein A assays, and immunoelectrophoresis assays, etc.

[0279] In one embodiment, antibody binding is detected by detecting a label on the primary antibody. In another embodiment, the primary antibody is detected by detecting binding of a secondary antibody or reagent to the primary antibody. In a further embodiment, the secondary antibody is labeled. Many means are known in the art for detecting binding in an immunoassay and are within the scope of the present invention. As is well known in the art, the immunogenic peptide should be provided free of the carrier molecule used in any immunization protocol. For example, if the peptide was conjugated to KLH, it may be conjugated to BSA, or used directly, in a screening assay. In some embodiments, an automated detection assay is utilized. Methods for the automation of immunoassays are well known in the art (See e.g., U.S. Pat. Nos. 5,885,530, 4,981,785, 6,159,750, and 5,358,691, each of which is herein incorporated by reference). In some embodiments, the analysis and presentation of results is also automated. For example, in some embodiments, software that generates a prognosis based on the presence or absence of a series of antigens is utilized.

[0280] Competitive binding assays rely on the ability of a labeled standard to compete with the test sample for binding with a limited amount of antibody. The amount of antigen in the test sample is inversely proportional to the amount of standard that becomes bound to the antibodies. To facilitate determining the amount of standard that becomes bound, the antibodies generally are insolubilized before or after the competition. As a result, the standard and test sample that are bound to the antibodies may conveniently be separated from the standard and test sample, which remain unbound.

[0281] Sandwich assays involve the use of two antibodies, each capable of binding to a different immunogenic portion, or epitope, or the protein to be detected. In a sandwich assay, the test sample to be analyzed is bound by a first antibody, which is immobilized on a solid support, and thereafter a second antibody binds to the test sample, thus forming an insoluble three-part complex. See e.g., U.S. Pat. No. 4,376,110. The second antibody may itself be labeled with a detectable moiety (direct sandwich assays) or may be measured using an anti-immunoglobulin antibody that is labeled with a detectable moiety (indirect sandwich assay). For example, one type of sandwich assay is an ELISA assay, in which case the detectable moiety is an enzyme.

[0282] The antibodies may also be used for in vivo diagnostic assays. Generally, the antibody is labeled with a radionucleotide (such as ¹¹¹In, ⁹⁹Tc, ¹⁴C, ¹³¹I, ³H, ³²P or ³⁵S) so that the tumor can be localized using immunoscintiography. In one embodiment, antibodies or fragments thereof bind to the extracellular domains of two or more CCAT targets and the affinity value (Kd) is less than 1×10⁸ M.

[0283] Antibodies for diagnostic use may be labeled with probes suitable for detection by various imaging methods. Methods for detection of probes include, but are not limited to, fluorescence, light, confocal and electron microscopy; magnetic resonance imaging and spectroscopy; fluoroscopy, computed tomography and positron emission tomography. Suitable probes include, but are not limited to, fluorescein, rhodamine, eosin and other fluorophores, radioisotopes, gold, gadolinium and other lanthanides, paramagnetic iron, fluorine-18 and other positron-emitting radionuclides. Additionally, probes may be bi- or multi-functional and be detectable by more than one of the methods listed. These antibodies may be directly or indirectly labeled with said probes. Attachment of probes to the antibodies includes covalent attachment of the probe, incorporation of the probe into the antibody, and the covalent attachment of a chelating compound for binding of probe, amongst others well recognized in the art.

[0284] For immunohistochemistry, the disease tissue sample may be fresh or frozen or may be embedded in paraffin and fixed with a preservative such as formalin (see Examples). The fixed or embedded section contains the sample are contacted with a labeled primary antibody and secondary antibody, wherein the antibody is used to detect the CCAT protein express in situ. The detailed procedure is shown in the Example.

### Array:

[0285] “Array” refers to an ordered arrangement of at least two transcripts, proteins or peptides, or antibodies on a substrate. At least one of the transcripts, proteins, or antibodies represents a control or standard, and the other transcript, protein, or antibody is of diagnostic or therapeutic interest. The arrangement of at least two and up to about 40,000 transcripts, proteins, or antibodies on the substrate assures that the size and signal intensity of each labeled complex, formed between each transcript and at least one nucleic acid, each protein and at least one ligand or antibody, or each antibody and at least one protein to which the antibody specifically binds, is individually distinguishable.

[0286] An “expression profile” is a representation of gene expression in a sample. A nucleic acid expression profile is produced using sequencing, hybridization, or amplification technologies using transcripts from a sample. A protein expression profile, although time delayed, minors the nucleic acid expression profile and is produced using gel electrophoresis, mass spectrometry, or an array and labeling moieties or antibodies which specifically bind the protein. The nucleic acids, proteins, or antibodies specifically binding the protein may be used in solution or attached to a substrate, and their detection is based on methods well known in the art.

[0287] A substrate includes but not limits to, paper, nylon or other type of membrane, filter, chip, glass slide, or any other suitable solid support.

[0288] The invention also provides an array with a cDNA or transcript encoding CCAT proteins or peptides or fragments thereof, antibodies that specifically bind CCAT proteins, peptides or fragments thereof. Preferably, two or more of the nucleic acid molecules (e.g., SEQ ID NOS: 684-1331), proteins (e.g., SEQ ID NOS: 1-683) or peptides (e.g., SEQ ID NOS: 1332-1501) are immobilized on a substrate. Specifically, the following targets are selected for targeting purpose: DPEP-1, Prominin-1, Integrin beta-4, Leukocyte Elastase, Defensin alpha 1, oligosaccharyl transferase 3, Wolframin, Ectonucleoside triphosphate diphosphohydrolase 2, T-cell surface glycoprotein CD5.

[0289] The present invention also provides an antibody array. Antibody arrays have allowed the development of techniques for high-throughput screening of recombinant antibodies. Such methods use robots to pick and grid bacteria containing antibody genes, and a filter-based ELISA to screen and identify clones that express antibody fragments. Because liquid handling is eliminated and the clones are arrayed from master stocks, the same antibodies can be spotted multiple times and screened against multiple antigens simultaneously. For more information, see de Wildt et al. (2000) Nat Biotechnol 18:989-94.

[0290] The array is prepared and used according to the methods described in U.S. Pat. No. 5,837,832, Chee et al., PCT application WO95/11995 (Chee et al.), Lockhart, D. J. et al. (1996; Nat. Biotech. 14: 1675-1680) and Schena, M. et al. (1996; Proc. Natl. Acad. Sci. 93: 10614-10619), U.S. Pat. No. 5,807,522, Brown et al., all of which are incorporated herein in their entirety by reference.

[0291] In one embodiment, a nucleic acid array or a microarray, preferably composed of a large number of unique, single-stranded nucleic acid sequences, usually either synthetic antisense oligonucleotides or fragments of cDNAs, fixed to a solid support. The oligonucleotides are preferably about 6-60 nucleotides in length, more preferably 15-30 nucleotides in length, and most preferably about 20-25 nucleotides in length.

[0292] In order to produce oligonucleotides to a known sequence for an array, the gene(s) of interest (or an ORF identified from the contigs of the present invention) is typically examined using a computer algorithm which starts at the 5′ or at the 3′ end of the nucleotide sequence. Typical algorithms will then identify oligomers of defined length that are unique to the gene, have a GC content within a range suitable for hybridization, and lack predicted secondary structure that may interfere with hybridization. In certain situations it may be appropriate to use pairs of oligonucleotides on an array. The “pairs” will be identical, except for one nucleotide that preferably is located in the center of the sequence. The second oligonucleotide in the pair (mismatched by one) serves as a control. The number of oligonucleotide pairs may range from two to one million. The oligomers are synthesized at designated areas on a substrate using a light-directed chemical process, wherein the substrate may be paper, nylon or other type of membrane, filter, chip, glass slide or any other suitable solid support as described above.

[0293] In another aspect, an oligonucleotide may be synthesized on the surface of the substrate by using a chemical coupling procedure and an ink jet application apparatus, as described in PCT application WO95/251116 (Baldeschweiler et al.) which is incorporated herein in its entirety by reference.

[0294] A gene expression profile comprises the expression of a plurality of transcripts as measured by after hybridization with a sample. The transcripts of the invention may be used as elements on an array to produce a gene expression profile. In one embodiment, the array is used to diagnose or monitor the progression of disease. Researchers can assess and catalog the differences in gene expression between healthy and diseased tissues or cells.

[0295] For example, the transcript or probe may be labeled by standard methods and added to a biological sample from a patient under conditions for the formation of hybridization complexes. After an incubation period, the sample is washed and the amount of label (or signal) associated with hybridization complexes, is quantified and compared with a standard value. If complex formation in the patient sample is significantly altered (higher or lower) in comparison to either a normal or disease standard, then differential expression indicates the presence of a disorder.

[0296] In order to provide standards for establishing differential expression, normal and disease expression profiles are established. This is accomplished by combining a sample taken from normal subjects, either animal or human or nonmammal, with a transcript under conditions for hybridization to occur. Standard hybridization complexes may be quantified by comparing the values obtained using normal subjects with values from an experiment in which a known amount of a purified sequence is used. Standard values obtained in this manner may be compared with values obtained from samples from patients who were diagnosed with a particular condition, disease, or disorder. Deviation from standard values toward those associated with a particular disorder is used to diagnose that disorder.

[0297] By analyzing changes in patterns of gene/protein expression, disease can be diagnosed at earlier stages before the patient is symptomatic. The invention can be used to formulate a prognosis and to design a treatment regimen. The invention can also be used to monitor the efficacy of treatment. For treatments with known side effects, the array is employed to improve the treatment regimen. A dosage is established that causes a change in genetic expression patterns indicative of successful treatment. Expression patterns associated with the onset of undesirable side effects are avoided.

[0298] In another embodiment, animal models which mimic a human disease can be used to characterize expression profiles associated with a particular condition, disease, or disorder; or treatment of the condition, disease, or disorder. Novel treatment regimens may be tested in these animal models using arrays to establish and then follow expression profiles over time. In addition, arrays may be used with cell cultures or tissues removed from animal models to rapidly screen large numbers of candidate drug molecules, looking for ones that produce an expression profile similar to those of known therapeutic drugs, with the expectation that molecules with the same expression profile will likely have similar therapeutic effects. Thus, the invention provides the means to rapidly determine the molecular mode of action of a drug.

[0299] Such assays may also be used to evaluate the efficacy of a particular therapeutic treatment regimen in animal studies or in clinical trials or to monitor the treatment of an individual patient. Once the presence of a condition is established and a treatment protocol is initiated, diagnostic assays may be repeated on a regular basis to determine if the level of expression in the patient begins to approximate that which is observed in a normal subject. The results obtained from successive assays may be used to show the efficacy of treatment over a period ranging from several days to years.

[0300] In one embodiment, the detected targets comprise, consist essentially of or consist of combinations of CCAT proteins or nucleic acids encoding such proteins. The combinations are either 2, 3, 4, 5, 6, 7, 8, 9, 10, 15, 20, 25, 30, 35, 40, 50, 60, 70, 80, 90, 100, 150, 200, 250 proteins (SEQ ID NOS: 1-683), nucleic acids (SEQ ID NOS: 684-1331) encoding such proteins, or peptides (SEQ ID NOS: 1332-1501).

[0301] In one embodiment, the protein or nucleic acid targets for detection of colon cancer comprise targets selected from a group consisting of DPEP-1, Prominin-1, Integrin beta-4, Leukocyte Elastase, Defensin alpha 1, oligosaccharyl transferase 3, Wolframin, Ectonucleoside triphosphate diphosphohydrolase 2, T-cell surface glycoprotein CD5 and combination thereof, wherein their corresponding sequences are listed in Table 1.

[0302] In another embodiment, the detection targets are combination of all the targets of DPEP-1, Prominin-1, Integrin beta-4, Leukocyte Elastase, Defensin alpha 1, oligosaccharyl transferase 3, Wolframin, Ectonucleoside triphosphate diphosphohydrolase 2, T-cell surface glycoprotein CD5.

[0303] In yet another embodiment, the invention provides a composition comprising a plurality of CCAT nucleic acid sequences for use in detecting the differential expression of genes in a disease state, wherein said plurality of nucleic acid sequences comprise two or more sequences of SEQ ID NOS: 684-1331, or all the sequences of SEQ ID NOS: 684-1331, or the complete complements thereof. Further, the nucleic acid sequences are immobilized on a substrate, and the said nucleic acid sequences are hybridizable elements on a microarray.

[0304] In yet another embodiment, the invention provides a composition comprising a plurality of CCAT proteins or peptides for use in detecting the differential expression of proteins in a disease state wherein said plurality of protein sequences comprise two or more sequences of SEQ ID NOS: 1-683 or all sequence of SEQ ID NOS: 1-683; and wherein said plurality of peptide sequences comprise two or more sequences of SEQ ID NOS: 1332-1501 or all sequence of SEQ ID NOS: 1332-1501.

[0305] In yet another embodiment, the compositions can be used in diagnosing or monitoring the treatment of colon cancer.

### Treatment

[0306] The following terms, as used in the present specification and claims, are intended to have the meaning as defined below, unless indicated otherwise.

[0307] “Treat,” “treating” or “treatment” of a disease includes:

(1) inhibiting the disease, i.e., arresting or reducing the development of the disease or its clinical symptoms, or (2) relieving the disease, i.e., causing regression of the disease or its clinical symptoms.

[0308] A “therapeutically effective amount” means the amount of an agent that, when administered to a subject for treating a disease, is sufficient to effect such treatment for the disease. The “therapeutically effective amount” will vary depending on the agent, the disease and its severity and the age, weight, etc., of the subject to be treated.

[0309] A “Colon or colorectal disease” includes but not limited to colon cancer, colon tumor, diverticulosis, diverticulitis, Crohn's disease, ulcerative colitis, irritable bowel syndrome, inflammatory bowel disease, hemorrhoids, and anal fissure.

[0310] A “cancer” is epithelial-cell related cancers including, but not limited to, pancreatic, lung, colon, prostate, ovarian, breast as well as, bladder and renal, hepatocellular, pharyngeal and gastric cancer.

[0311] The present invention provides an application of treatment by using antibody, immunogenic peptides as well as other CCAT agonists or antagonists.

[0312] CCATs are proteins differentially expressed in the colon diseases cell lines or tissues. The proteins are either cell surface proteins or cytosolic proteins (see the list in Table 1). These proteins are associated with the diseases especially colon diseases, particularly colon cancer; thus, they serve as candidate targets for the treatment of the diseases.

[0313] In one embodiment, when decreased expression or activity of the protein is desired, an inhibitor, antagonist, antibody and the like or a pharmaceutical agent containing one or more of these molecules may be delivered. Such delivery may be effected by methods well known in the art and may include delivery by an antibody specifically targeted to the protein. Neutralizing antibodies, which inhibit dimer formation, are generally preferred for therapeutic use.

[0314] In another embodiment, when increased expression or activity of the protein is desired, the protein, an agonist, an enhancer and the like or a pharmaceutical agent containing one or more of these molecules may be delivered. Such delivery may be effected by methods well known in the art and may include delivery of a pharmaceutical agent by an antibody specifically targeted to the protein.

[0315] Any of the transcripts, complementary molecules, or fragments thereof, proteins or portions thereof, vectors delivering these nucleic acid molecules or expressing the proteins, and their ligands may be administered in combination with other therapeutic agents. Selection of the agents for use in combination therapy may be made by one of ordinary skill in the art according to conventional pharmaceutical principles. A combination of therapeutic agents may act synergistically to affect treatment of a particular disorder at a lower dosage of each agent.

### Antibody Therapy

[0316] The antibody of the present invention can be used for therapeutic reason. It is contemplated that the antibody of the present invention may be used to treat a mammal, preferably human with colon diseases.

[0317] In general, the antibodies are also useful for inhibiting protein function, for example, blocking the binding of the CCAT protein or peptide to a binding partner such as a substrate. These uses can also be applied in a therapeutic context in which treatment involves inhibiting the protein's function. An antibody can be used, for example, to block binding, thus modulating (agonizing or antagonizing) the peptides activity. Antibodies can be prepared against specific fragments containing sites required for function or against intact protein that is associated within a cell or cell membrane. The function blocking assays are provided in detail in the Examples. Other evidence is provided in U.S. Pat. No. 6,207,152, and U.S. Pat. No. 6,387,371.

[0318] The antibodies of present invention can also be used as means of enhancing the immune response. The antibodies can be administered in amounts similar to those used for other therapeutic administrations of antibody. For example, pooled gamma globulin is administered at a range of about 1 mg to about 100 mg per patient. Thus, antibodies reactive with the protein or peptides of CCAT can be passively administered alone or in conjunction with other anti-cancer therapies to a mammal afflicted-with colon diseases or cancer. Examples of anti-cancer therapies include, but are not limited to, chemotherapy, radiation therapy, adoptive immunotherapy therapy with TIL (Tumor Infiltration Lymphocytes).

[0319] The selection of an antibody subclass for therapy will depend upon the nature of the disease tumor antigen. For example, an IgM may be preferred in situations where the antigen is highly specific for the diseased target and rarely occurs on normal cells. However, where the disease-associated antigen is also expressed in normal tissues, although at much lower levels, the IgG subclass may be preferred for the following reason: since the binding of at least two IgG molecules in close proximity is required to activate complement, less complement mediated damage may occur in the normal tissues which express smaller amounts of the antigen and, therefore, bind fewer IgG antibody molecules. Furthermore, IgG molecules by being smaller may be more able than IgM molecules to localize to the diseased tissue.

[0320] The mechanism for antibody therapy is that the therapeutic antibody recognizes a cell surface protein or a cytosolic protein that is overexpressed in diseased cells. By NK cell or complement activation, conjugation of the antibody with an immunotoxin or radiolabel, the interaction can abrogate ligand/receptor interaction or activation of apoptosis.

[0321] The potential mechanisms of antibody-mediated cytotoxicity of diseased cells are phagocyte (antibody dependent cellular cytotoxicity (ADCC)) (see Example), complement (Complement-mediated cytotoxicity (CMC)) (see Example), naked antibody (receptor cross-linking apoptosis and growth factor inhibition), or targeted payload labeled with radionuclide or immunotoxins or immunochemotherapeutics.

[0322] In one embodiment, the antibody is administered to a nonhuman mammal for the purposes of obtaining preclinical data, for example. Exemplary nonhuman mammals to be treated include nonhuman primates, dogs, cats, rodents and other mammals in which preclinical studies are performed. Such mammals may be established animal models for a disease to be treated with the antibody or may be used to study toxicity of the antibody of interest. In each of these embodiments, dose escalation studies may be performed on the mammal.

[0323] The antibody is administered by any suitable means, including parenteral, subcutaneous, intraperitoneal, intrapulmonary, and intranasal, and, if desired for local immunosuppressive treatment, intralesional administration. Parenteral infusions include intramuscular, intravenous, intraarterial, intraperitoneal, or subcutaneous administration. In addition, the antibody variant is suitably administered by pulse infusion, particularly with declining doses of the antibody variant. Preferably the dosing is given by injections, most preferably intravenous or subcutaneous injections, depending in part on whether the administration is brief or chronic.

[0324] For the prevention or treatment of a disease, the appropriate dosage of the antibody will depend on the type of disease to be treated, the severity and the course of the disease, whether the antibody is administered for preventive or therapeutic purposes, previous therapy, the patient's clinical history and response to the antibody, and the discretion of the attending physician.

[0325] Depending on the type and severity of the disease, about 1 mug/kg to 150 mg/kg (e.g., 0.1-20 mg/kg) of antibody is an initial candidate dosage for administration to the patient, whether, for example, by one or more separate administrations, or by continuous infusion. A typical daily dosage might range from about 1 .mu.g/kg to 100 mg/kg or more, depending on the factors mentioned above. For repeated administrations over several days or longer, depending on the condition, the treatment is sustained until a desired suppression of disease symptoms occurs. However, other dosage regimens may be useful. The progress of this therapy is easily monitored by conventional techniques and assays.

[0326] The antibody composition will be formulated, dosed and administered in a manner consistent with good medical practice. Factors for consideration in this context include the particular disorder being treated, the particular mammal being treated, the clinical condition of the individual patient, the cause of the disorder, the site of delivery of the agent, the method of administration, the scheduling of administration, and other factors known to medical practitioners.

[0327] The therapeutically effective amount of the antibody to be administered will be governed by such considerations, and is the minimum amount necessary to prevent, ameliorate, or treat a disease or disorder. The antibody need not be, but is optionally formulated with one or more agents currently used to prevent or treat the disorder in question.

[0328] Antibodies of the present invention may also be used as therapeutic reagents, to diminish or eliminate cancer or tumors. For example, the antibodies may be used on their own (for instance, to inhibit metastases) or coupled to one or more therapeutic agents. Suitable agents in this regard include radionuclides, differentiation inducers, drugs, toxins, and derivatives thereof. Preferred radionuclides include ⁹⁰Y, ¹²³I, ¹²⁵I, ¹³¹I, ¹⁸⁶Re, ¹⁸⁸Re, ²¹¹At, and ²¹²Bi. Preferred drugs include methotrexate, and pyrimidine and purine analogs. Preferred differentiation inducers include phorbol esters and butyric acid. Preferred toxins include ricin, abrin, diptheria toxin, cholera toxin, gelonin, Pseudomonas exotoxin, Shigella toxin, and pokeweed antiviral protein.

[0329] A therapeutic agent may be coupled (e.g., covalently bonded) to a suitable monoclonal antibody either directly or indirectly (e.g., via a linker group). A direct reaction between an agent and an antibody is possible when each possesses a substituent capable of reacting with the other. For example, a nucleophilic group, such as an amino or sulfhydryl group, on one may be capable of reacting with a carbonyl-containing group, such as an anhydride or an acid halide, or with an alkyl group containing a good leaving group (e.g., a halide) on the other.

[0330] Alternatively, it may be desirable to couple a therapeutic agent and an antibody via a linker group. A linker group can function as a spacer to distance an antibody from an agent in order to avoid interference with binding capabilities. A linker group can also serve to increase the chemical reactivity of a substituent on an agent or an antibody, and thus increase the coupling efficiency. An increase in chemical reactivity may also facilitate the use of agents, or functional groups on agents, which otherwise would not be possible.

[0331] It will be evident to those skilled in the art that a variety of bifunctional or polyfunctional reagents, both homo- and hetero-functional (such as those described in the catalog of the Pierce Chemical Co., Rockford, Ill.), may be employed as the linker group. Coupling may be affected, for example, through amino groups, carboxyl groups, sulfhydryl groups or oxidized carbohydrate residues. There are numerous references describing such methodology, e.g. U.S. Pat. No. 4,671,958, to Rodwell et al.

[0332] Where a therapeutic agent is more potent when free from the antibody portion of the immunoconjugates of the present invention, it may be desirable to use a linker group which is cleavable during or upon internalization into a cell. A number of different cleavable linker groups have been described. The mechanisms for the intracellular release of an agent from these linker groups include cleavage by reduction of a disulfide bond (e.g., U.S. Pat. No. 4,489,710, to Spitler), by irradiation of a photolabile bond (e.g., U.S. Pat. No. 4,625,014, to Senter et al.), by hydrolysis of derivatized amino acid side chains (e.g., U.S. Pat. No. 4,638,045, to Kohn et al.), by serum complement-mediated hydrolysis (e.g., U.S. Pat. No. 4,671,958, to Rodwell et al.), and acid-catalyzed hydrolysis (e.g., U.S. Pat. No. 4,569,789, to Blattler et al.).

[0333] It may be desirable to couple more than one agent to an antibody. In one embodiment, multiple molecules of an agent are coupled to one antibody molecule. In another embodiment, more than one type of agent may be coupled to one antibody. Regardless of the particular embodiment, immunoconjugates with more than one agent may be prepared in a variety of ways as described above.

[0334] While it is possible for the immunogen to be administered in a pure or substantially pure form, it is preferable to present it as a pharmaceutical composition, formulation or preparation with a carrier.

[0335] The formulations of the present invention, both for veterinary and for human use, comprise an immunogen as described above, together with one or more pharmaceutically acceptable carriers and, optionally, other therapeutic ingredients. The carrier(s) must be “acceptable” in the sense of being compatible with the other ingredients of the formulation and not deleterious to the recipient thereof. The formulations may conveniently be presented in unit dosage form and may be prepared by any method well-known in the pharmaceutical art.

[0336] Suitable pharmaceutical carriers include proteins such as albumins (e.g., U.S. Pat. No. 4,507,234, to Kato et al.), peptides and polysaccharides such as aminodextran (e.g., U.S. Pat. No. 4,699,784, to Shih et al.), or water. A carrier may also bear an agent by noncovalent bonding or by encapsulation, such as within a liposome vesicle (e.g., U.S. Pat. Nos. 4,429,008 and 4,873,088). Carriers specific for radionuclide agents include radiohalogenated small molecules and chelating compounds. For example, U.S. Pat. No. 4,735,792 discloses representative radiohalogenated small molecules and their synthesis. A radionuclide chelate may be formed from chelating compounds that include those containing nitrogen and sulfur atoms as the donor atoms for binding the metal, metal oxide, radionuclide. For example, U.S. Pat. No. 4,673,562, to Davison et al. discloses representative chelating compounds and their synthesis.

[0337] All methods include the step of bringing into association the active ingredient with the carrier, which constitutes one or more accessory ingredients. In general, the formulations are prepared by uniformly and intimately bringing into association the active ingredient with liquid carriers or finely divided solid carriers or both, and then, if necessary, shaping the product into the desired formulation.

[0338] Formulations suitable for intravenous intramuscular, subcutaneous, or intraperitoneal administration conveniently comprise sterile aqueous solutions of the active ingredient with solutions, which are preferably isotonic with the blood of the recipient. Such formulations may be conveniently prepared by dissolving solid active ingredient in water containing physiologically compatible substances such as sodium chloride (e.g. 0.1-2.0M), glycine, and the like, and having a buffered pH compatible with physiological conditions to produce an aqueous solution, and rendering said solution sterile. These may be present in unit or multi-dose containers, for example, sealed ampoules or vials.

[0339] The formulations of the present invention may incorporate a stabilizer. Illustrative stabilizers are polyethylene glycol, proteins, saccharides, amino acids, inorganic acids, and organic acids, which may be used either on their own or as admixtures. These stabilizers are preferably incorporated in an amount of 0.11-10,000 parts by weight per part by weight of immunogen. If two or more stabilizers are to be used, their total amount is preferably within the range specified above. These stabilizers are used in aqueous solutions at the appropriate concentration and pH. The specific osmotic pressure of such aqueous solutions is generally in the range of 0.1-3.0 osmoles, preferably in the range of 0.8-1.2. The pH of the aqueous solution is adjusted to be within the range of 5.0-9.0, preferably within the range of 6-8. In formulating the antibody of the present invention, anti-adsorption agent may be used.

[0340] Additional pharmaceutical methods may be employed to control the duration of action. Controlled release preparations may be achieved through the use of polymer to complex or absorb the proteins or their derivatives. The controlled delivery may be exercised by selecting appropriate macromolecules (for example polyester, polyamino acids, polyvinyl, pyrrolidone, ethylenevinylacetate, methylcellulose, carboxymethylcellulose, or protamine sulfate) and the concentration of macromolecules as well as the methods of incorporation in order to control release. Another possible method to control the duration of action by controlled-release preparations is to incorporate the CCAT antibody into particles of a polymeric material such as polyesters, polyamino acids, hydrogels, poly(lactic acid) or ethylene vinylacetate copolymers. Alternatively, instead of incorporating these agents into polymeric particles, it is possible to entrap these materials in microcapsules prepared, for example, by coacervation techniques or by interfacial polymerization, for example, hydroxymethylcellulose or gelatin-microcapsules and poly(methylmethacylate) microcapsules, respectively, or in colloidal drug delivery systems, for example, liposomes, albumin microspheres, microemulsions, nanoparticles, and nanocapsules or in macroemulsions.

[0341] When oral preparations are desired, the compositions may be combined with typical carriers, such as lactose, sucrose, starch, talc magnesium stearate, crystalline cellulose, methyl cellulose, carboxymethyl cellulose, glycerin, sodium alginate or gum arabic among others.

[0342] The therapeutic antibody may be supplied in the form of a kit, alone, or in the form of a pharmaceutical composition as described above.

### Other Immunotherapy

[0343] The CCAT proteins or peptides or fragments thereof of this invention are also intended for use in producing antiserum designed for pre- or post-disease prophylaxis. Here the protein, peptides or fragment thereof, is formulated with a suitable adjuvant and administered by injection to human volunteers, according to known methods for producing human antisera. Antibody response to the injected proteins is monitored, during a several-week period following immunization, by periodic serum sampling to detect the presence of antiserum antibodies, using an immunoassay as described herein.

[0344] The antiserum from immunized individuals may be administered as a prophylactic measure for individuals who are at risk of developing colon diseases or cancer. The antiserum is also useful in treating an individual afflicted with colon diseases or cancer for post-disease prophylaxis.

[0345] Alternatively, peptides derived form the CCAT protein sequence may be modified to increase their immunogenicity by enhancing binding of the peptide to the MHC molecules in which the peptide is presented. The peptide or modified peptide may be conjugated to a carrier molecule to enhance the antigenicity of the peptide. Examples of carrier molecules, include, but are not limited to, human albumin, bovine albumin, lipoprotein and keyhole limpet hemo-cyanin (“Basic and Clinical Immunology” (1991) Stites, D. P. and Ten A. I. (eds) Appleton and Lange, Norwalk Conn., San Mateo, Calif.).

[0346] An “immunogenic peptide” is a peptide, which comprises an allele-specific motif such that the peptide will bind the MHC allele (HLA in human) and be capable of inducing a CTL (cytoxic T-lymphocytes) response. Thus, immunogenic peptides are capable of binding to an appropriate class I or II MHC molecule and inducing a cytotoxic T cell or T helper cell response against the antigen from which the immunogenic peptide is derived.

[0347] Alternatively, amino acid sequence variants of the peptide can be prepared by mutations in the DNA, which encodes the peptide, or by peptide synthesis.

[0348] At the genetic level, these variants ordinarily are prepared by site-directed mutagenesis of nucleotides in the DNA encoding the peptide molecule, thereby producing DNA encoding the variant, and thereafter expressing the DNA in recombinant cell culture. The variants typically exhibit the same qualitative biological activity as the nonvariant peptide.

[0349] T-lymphocytes recognize antigen in association with Class I or Class II MHC molecules in the form of a peptide fragment bound to an MHC molecule. The degree of peptide binding to a given MHC allele is based on amino acids at particular positions within the peptide (Parker et al. (1992) Journal of Immunology 149:3580; Kubo, et al. (1994) Journal of Immunology 52:3913-3924; Ruppert J. et al. (1993) Cell 74:929-937; Falk et al. (1991) Nature 351:290-296). The peptides of the present invention are useful as an epitope for immunogenic response (see more detailed description below).

[0350] In human, MHC is called HLA, wherein class 1 molecules are encoded by the HLA-A, B, and C loci. HLA-A and B antigens are expressed at the cell surface at approximately equal densities, whereas the expression of HLA-C is significantly lower (about 10-fold lower). Each of these loci has a number of alleles. MHC class II molecules are encoded by three pairs of MHC II alpha- and beta-chain genes, called HLA DR, -DP, and -DQ in human. In many haplotypes the HLA-DR cluster contains an extra beta-chain gene whose product can pair with the DR alpha chain. Each MHC class I and II molecule binds a different rage of peptides. The present of several loci means that any one individual is equipped to present a much broader ranger of different peptides than if only one MHC protein of each class were expressed at the cell surface. The peptide binding motifs of the present invention are designed to be specific for each allelic subtype.

[0351] The peptides of the present invention are used for treatment of the colon diseases. Treatment involves administration of the protective composition after the appearance of the disease.

[0352] The present invention is also applied to prevent and suppress the disease. It is not always possible to distinguish between “preventing” and “suppressing” since the ultimate inductive event or events may be unknown, latent, or the patient is not ascertained until well after the occurrence of the event or events. Therefore, it is common to use the term “prophylaxis” as distinct from “treatment” to encompass both “preventing” and “suppressing” as defined herein. The term “protection,” as used herein, is meant to include “prophylaxis.”

[0353] The peptides are used for treating T cell-mediated pathology. The term “T cell-mediated pathology” refers to any condition in which an inappropriate T cell response is a component of the pathology. The term is intended to encompass both T cell mediated colon diseases and diseases resulting from unregulated clonal T cell replication.

[0354] Therefore, the present invention relates to peptides or modified peptides derived from the protein sequences of the CCAT proteins that differentially expressed in the colon diseases. By way of example, modification may include substitution, deletion or addition of an amino acid in the given immunogenic peptide sequence or mutation of existing amino acids within the given immunogenic peptide sequence, or derivatization of existing amino acids within the given immunogenic peptide sequence. Any amino acid comprising the immunogenic peptide sequence may be modified in accordance with this invention. In one aspect, at least one amino acid is substituted or replaced within the given immunogenic peptide sequence. Any amino acid may be used to substitute or replace a given amino acid within the immunogenic peptide sequence. Modified peptides are intended to include any immunogenic peptide obtained from differentially expressed proteins, which has been modified and exhibits enhanced binding to the MHC molecule with which it associates when presented to the T-cell. These modified peptides may be synthetically or recombinantly produced by conventional methods.

[0355] In another embodiment, the peptides of the present invention comprise, or consisting sequences of about 5-8, 8-10, 10-15 or 15-30 amino acids which are immunogenic, that is, capable of inducing an immune response when injected into a subject.

[0356] The recombinant or natural protein, peptides, or fragment thereof of CCAT, or modified peptides, may be used as a vaccine either prophylactically or therapeutically. When provided prophylactically the vaccine is provided in advance of any evidence of colon diseases, particularly, cancer. The prophylactic administration of the colon disease vaccine should serve to prevent or attenuate colon diseases, preferably cancer, in a mammal.

[0357] Preparation of vaccine is using recombinant protein or peptide expression vectors comprising all or part of nucleic acid sequence of CCAT proteins encoding peptides. Examples of vectors that may be used in the aforementioned vaccines include, but are not limited to, defective retroviral vectors, adenoviral vectors vaccinia viral vectors, fowl pox viral vectors, or other viral vectors (Mulligan, R. C., (1993) Science 260:926-932). The viral vectors carrying all or part of nucleic sequence of SEQ ID NOS: 684-1331 can be introduced into a mammal either prior to any evidence of colon diseases or to mediate regression of the disease in a mammal afflicted with colon diseases. Examples of methods for administering the viral vector into the mammals include, but are not limited to, exposure of cells to the virus ex vivo, or injection of the retrovirus or a producer cell line of the virus into the affected tissue or intravenous administration of the virus. Alternatively the viral vector carrying all or part of the CCAT nucleic acid sequence that encode peptides may be administered locally by direct injection into the cancer lesion or topical application in a pharmaceutically acceptable carrier. The quantity of viral vector, carrying all or part of the CCAT nucleic acid sequence, to be administered is based on the titer of virus particles. A preferred range of the immunogen to be administered may be about 106 to about 1011 virus particles per mammal, preferably a human. After immunization the efficacy of the vaccine can be assessed by production of antibodies or immune cells that recognize the antigen, as assessed by specific lytic activity or specific cytokine production or by tumor regression. One skilled in the art would know the conventional methods to assess the aforementioned parameters. If the mammal to be immunized is already afflicted with cancer, the vaccine can be administered in conjunction with other therapeutic treatments. Examples of other therapeutic treatments includes, but are not limited to, adoptive T cell immunotherapy, coadministration of cytokines or other therapeutic drugs for cancer.

[0358] Alternatively all or parts thereof of a substantially or partially purified the CCAT protein or their peptides may be administered as a vaccine in a pharmaceutically acceptable carrier. Ranges of the protein that may be administered are about 0.001 to about 100 mg per patient, preferred doses are about 0.01 to about 100 mg per patient. In a preferred embodiment, the peptides or modified peptides thereof is administered therapeutically or prophylactically to a mammal in need of such treatment. The peptide may be synthetically or recombinantly produced. Immunization is repeated as necessary, until a sufficient titer of anti-immunogen antibody or immune cells has been obtained.

[0359] In yet another alternative embodiment a viral vector, such as a retroviral vector, can be introduced into mammalian cells. Examples of mammalian cells into which the retroviral vector can be introduced include, but are not limited to, primary mammalian cultures or continuous mammalian cultures, COS cells, NIH3T3, or 293 cells (ATTC #CRL 1573), dendritic cells. The means by which the vector carrying the gene may be introduced into a cell includes, but is not limited to, microinjection, electroporation, transfection or transfection using DEAE dextran, lipofection, calcium phosphate or other procedures known to one skilled in the art (Sambrook et al. (EDS) (2001) in “Molecular Cloning. A laboratory manual”, Cold Spring Harbor Press Plainview, N.Y.).

[0360] The vaccine formulation of the present invention comprises an immunogen that induces an immune response directed against the cancer associated antigens such as the CCATs, and in nonhuman primates and finally in humans. The safety of the immunization procedures is determined by looking for the effect of immunization on the general health of the immunized animal (weight change, fever, appetite behavior etc.) and looking for pathological changes on autopsies. After initial testing in animals, cancer patients can be tested. Conventional methods would be used to evaluate the immune response of the patient to determine the efficiency of the vaccine.

[0361] Measurement of candidate disease tumor antigen or vaccine expression in patients is the first step of the present invention. Subsequent steps will focus on measuring immune responses to these candidate antigens or vaccine. Sera from disease patients, particularly cancer patients, and healthy donors will be screened for antibodies to the candidate antigens as well as for levels of circulating tumor derived antigens. The vaccine formulations may be evaluated first in animal models, initially rodents.

[0362] In one embodiment mammals, preferably human, at high risk for colon diseases, particularly cancer, are prophylactically treated with the vaccines of this invention. Examples of such mammals include, but are not limited to, humans with a family history of colon diseases, humans with a history of colon diseases, particular cancer, or humans afflicted with colon cancer previously resected and therefore at risk for reoccurrence. When provided therapeutically, the vaccine is provided to enhance the patient's own immune response to the diseased antigen present on the colon diseases or advanced stage of colon diseases. The vaccine, which acts as an immunogen, may be a cell, cell lysate from cells transfected with a recombinant expression vector, cell lysates from cells transfected with a recombinant expression vector, or a culture supernatant containing the expressed protein. Alternatively, the immunogen is a partially or substantially purified recombinant protein, peptide or analog thereof or modified peptides or analogs thereof. The proteins or peptides may be conjugated with lipoprotein or administered in liposomal form or with adjuvant.

[0363] While it is possible for the immunogen to be administered in a pure or substantially pure form, it is preferable to present it as a pharmaceutical composition, formulation or preparation. The formulations of the present invention are described in the previous section.

[0364] Vaccination can be conducted by conventional methods. For example, the immunogen can be used in a suitable diluent such as saline or water, or complete or incomplete adjuvants. Further, the immunogen may or may not be bound to a carrier to make the protein immunogenic. Examples of such carrier molecules include but are not limited to bovine serum albumin (BSA), keyhole limpet hemocyanin (KLH), tetanus toxoid, and the like. The immunogen also may be coupled with lipoproteins or administered in liposomal form or with adjuvants. The immunogen can be administered by any route-appropriate for antibody production such as intravenous, intraperitoneal, intramuscular, subcutaneous, and the like. The immunogen may be administered once or at periodic intervals until a significant titer of anti-CCAT immune cells or anti-CCAT antibody is produced. The presence of anti-CCAT immune cells may be assessed by measuring the frequency of precursor CTL (cytoxic T-lymphocytes) against CCAT antigen prior to and after immunization by a CTL precursor analysis assay (Coulie, P. et al., (1992) International Journal Of Cancer 50:289-297). The antibody may be detected in the serum using the immunoassay described above.

[0365] The safety of the immunization procedures is determined by looking for the effect of immunization on the general health of the immunized animal (weight change, fever, appetite behavior etc.) and looking for pathological changes on autopsies. After initial testing in animals, colon disease patients can be tested. Conventional methods would be used to evaluate the immune response of the patient to determine the efficiency of the vaccine.

[0366] In yet another embodiment of this invention all, part, or parts of the CCAT proteins or peptides or fragments thereof, or modified peptides, may be exposed to dendritic cells cultured in vitro. The cultured dendritic cells provide a means of producing T-cell dependent antigens comprised of dendritic cell modified antigen or dendritic cells pulsed with antigen, in which the antigen is processed and expressed on the antigen activated dendritic cell. The CCAT antigen activated dendritic cells or processed dendritic cell antigens may be used as immunogens for vaccines or for the treatment of colon diseases, particularly colon cancer. The dendritic cells should be exposed to antigen for sufficient time to allow the antigens to be internalized and presented on the dendritic cells surface. The resulting dendritic cells or the dendritic cell process antigens can than be administered to an individual in need of therapy. Such methods are described in Steinman et al. (WO93/208185) and in Banchereau et al. (EPO Application 0563485A1).

[0367] In yet another aspect of this invention T-cells isolated from individuals can be exposed to the CCAT proteins, peptides or fragments thereof, or modified peptides in vitro and then administered to a patient in need of such treatment in a therapeutically effective amount. Examples of where T-lymphocytes can be isolated include but are not limited to, peripheral blood cells lymphocytes (PBL), lymph nodes, or tumor infiltrating lymphocytes (TIL). Such lymphocytes can be isolated from the individual to be treated or from a donor by methods known in the art and cultured in vitro (Kawakami, Y. et al. (1989) J. Immunol. 142: 2453-3461). Lymphocytes are cultured in media such as RPMI or RPMI 1640 or AIM V for 1-10 weeks. Viability is assessed by trypan blue dye exclusion assay. Examples of how these sensitized T-cells can be administered to the mammal include but are not limited to, intravenously, intraperitoneally or intralesionally. Parameters that may be assessed to determine the efficacy of these sensitized T-lymphocytes include, but are not limited to, production of immune cells in the mammal being treated or tumor regression. Conventional methods are used to assess these parameters. Such treatment can be given in conjunction with cytokines or gene modified cells (Rosenberg, S. A. et al. (1992) Human Gene Therapy, 3: 75-90; Rosenberg, S. A. et al. (1992) Human Gene Therapy, 3: 57-73).

[0368] The present invention is further described by the following example. The example is provided solely to illustrate the invention by reference to specific embodiments. This exemplification, while illustrating certain aspects of the invention, does not offer the limitations or circumscribe the scope of the disclosed invention.

[0369] All examples outlined here were carried out using standard techniques, which are well known and routine to those of skill in the art. Routine molecular biology techniques of the following example can be carried out as described in standard laboratory manuals, such as Sambrook et al., Molecular Cloning: A laboratory Manual, 3^{rd} Ed.; Cold Spring Harbor Laboratory, Cold Spring Harbor, N.Y. (2001).

### WORKING EXAMPLES

### 1. Colon Tissues and Cells

### Colon Cell Line

TABLE 2

| | ATCC |
|---|---|
| Cell line | Catalog # |
| SW1116 | CCL-233 |
| HT29 | HTB-38 |
| LS174T | CL-188 |
| LS 180 | CL-187 |
| SW480 | CCL-228 |
| CaCo-2 | HTB-37 |
| LS411N | CRL-2159 |
| RKO | CRL-2577 |
| Colo320DM | CCL-220 |
| HCT 15 | CCL-225 |
| HCT-116 | CCL-247 |
| LS1034 | CRL-2158 |
| LS513 | CRL-2134 |
| SNU-C2B | CCL-250 |
| SW1463 | CCL-234 |
| SW403 | CCL-230 |
| SW48 | CCL-231 |
| SW948 | CCL-237 |
| SW837 | CCL-235 |
| DLD-1 | CCL-221 |
| NCI-H548 | CCL-249 |

### Colon Cancer Cell Line Culture

[0371] Cell lines were grown in a culturing medium that is supplemented as necessary with growth factors and serum (as described in Table 2). Cultures were established from frozen stocks in which the cells were suspended in a freezing medium (cell culture medium with 10% DMSO [v/v]) and flash frozen in liquid nitrogen. Frozen stocks prepared in this way were stored in the liquid nitrogen vapour. Cell cultures were established by rapidly thawing frozen stocks at 37° C. Thawed stock cultures were slowly transferred to a culture vessel containing a large volume of culture medium that was supplemented. For maintenance of culture, cells were seeded at 1×10⁵ cells/per ml in medium and incubated at 37° C. until confluence of cells in the culture vessel exceeds 50% by area. At this time, cells were harvested from the culture vessel using enzymes or EDTA where necessary. The density of harvested, viable cells was estimated by hemocytometry and the culture reseeded as above. A passage of this nature was repeated no more than 25 times at which point the culture was destroyed and reestablished from frozen stocks as described above.

[0372] For the analyses of cell surface protein expression in cultured cell lines cells were grown as described above. At a period 24 h prior to the experiment, the cell line was passaged as described above. This yielded cell densities that were <50% confluent and growing exponentially. Typically, triplicate analyses of differential expression were performed for each line relative to control for the purpose of identifying statistically significant reproducible differentially expressed proteins.

### Tissue Processing

[0373] All tissues were procured as fresh specimens. Tissues were collected as remnant tissues following surgical resection of colorectal tissues. Remnant tissues were supplied following processing for pathological diagnosis according to proper standards of patient care. Procurement of all tissues was performed in an anonymised manner in strict compliance with Federal mandated ethical and legal guidelines (HIPAA) and in accordance with clinical institution ethical review board as well as the internal institutional review board. Tissues were transported on ice in ice-cold transport buffer by courier for processing.

[0374] i) Enrichment of Epithelial Cells from Normal Colorectal Mucosa

[0375] Normal colorectal tissue was transferred from the transport vessel to a sterile dish containing 25 ml of ice-cold transport buffer. The tissue was measured, weighed and photographed. The tissue was dissected to isolate colorectal mucosa which was transferred to a fresh dish containing 25 ml ice-cold Hanks buffered saline solution. The tissue section was washed by vigorous shaking and the HBSS replaced. This was repeated 2 further times or until all visible mucus was removed. Mucosa was measured, weighed and diced into 1 mm2 sections. The tissues sections were transferred to a 50 ml polypropylene centrifuge tube containing 50 ml of A52 media (Biosource) supplemented with 2 mM L-glutamine and 1.5 mg/ml dispase (Roche Biochemicals). The digest was incubated for 1 h at 37° C. with frequent agitation. Following the incubation, the suspension was poured through a 40-mesh cell sieve situated in the base of a 15 cm culture dish. The filtrate was diluted to 50 ml using A52 media supplemented with 2 mM L-glutamine and passed through a 200-mesh cell sieve. The filtrate was collected into a 50 ml polypropylene centrifuge tube and the suspension was triturated several times followed by vortexing for 2 min at setting 6. The density and viability of nucleated cells was determined by flow cytometry using propidium iodide as a negative stain for viability (Guava system). Erythrocytes were lysed using a standard ammonium chloride lysis protocol with incubation at room temperature for 10 s. Cells were harvested by centrifugation at 500 g for 5 min at 4° C. The cell pellet was resuspended in 50 ml of ice-cold HBSS and recentrifuged. The final cell pellet was resuspended in 3 ml of ice-cold HBSS supplemented with 0.1% BSA and 0.25M EDTA. Cell density and viability were estimated using the Guava system and the density adjusted to 1×10⁷ cells per ml. Epithelial cells were stained with a FITC-labeled anti-EpCAM murine monoclonal antibody and enriched by cell sorting using flow cytometry.

[0376] ii) Enrichment of Tumor Cells from Colorectal Tumor Tissue

[0377] Colorectal tumor tissue was transferred from the transport vessel to a sterile dish containing 25 ml of ice-cold transport buffer. The tissue was measured, weighed and photographed. The tissue was dissected to remove necrotic and fibrotic tissue plaques and the tumour tissue transferred to a fresh dish containing 25 ml ice-cold Hanks buffered saline solution. The tissue section was washed by vigorous shaking and the HBSS replaced. This was repeated 2 further times or until all visible mucus was removed. Tumour tissue was measured, weighed and extensively diced. The tissues slurry was transferred to a 50 ml polypropylene centrifuge tube containing 50 ml of A52 media (Biosource) supplemented with 2 mM L-glutamine and 1.5 mg/ml dispase (Roche Biochemicals). The digest was incubated for 1 h at 37° C. with frequent agitation. Following the incubation, the suspension was poured through a 40-mesh cell sieve situated in the base of a 15 cm culture dish. The filtrate was diluted to 50 ml using A52 media supplemented with 2 mM L-glutamine and passed through a 200-mesh cell sieve. The filtrate was collected into a 50 ml polypropylene centrifuge tube and the suspension was triturated several times followed by vortexing for 2 min at setting 6. The density and viability of nucleated cells was determined by flow cytometry using propidium iodide as a negative stain for viability (Guava system). Erythrocytes were lysed using a standard ammonium chloride lysis protocol with incubation at room temperature for 10 s. Cells were harvested by centrifugation at 500 g for 5 min at 4° C. The cell pellet was resuspended in 50 ml of ice-cold HBSS and recentrifuged. The final cell pellet was resuspended in 3 ml of ice-cold HBSS supplemented with 0.1% BSA and 0.25M EDTA. Cell density and viability were estimated using the Guava system and the density adjusted to 1×10⁷ cells per ml. Epithelial cells were stained with a FITC-labeled anti-EpCAM murine monoclonal antibody and enriched by cell sorting using flow cytometry.

[0378] iii) Enrichment of Cell Surface Proteins from Sorted Epithelial and Tumor Cells

[0379] Sorted cells were centrifuged at 500 g at 4° C. for 5 min and resuspended in 50 ml of ice-cold DPBS. The cell suspension was washed by 2 further cycles of centrifugation 500 g at 4° C. for 5 min and resuspension of the cell pellet in 50 ml of ice-cold DPBS. Finally, the cell pellet was resuspended in 9.5 ml of ice-cold DPBS and sodium metaperiodate added to a final concentration of 1 mM. The cell suspension was incubated on ice for 10 min with frequent agitation in the dark. Cells were centrifuged at 500 g at 4° C. for 5 min and resuspended in 50 ml of ice-cold DPBS. The cell suspension was washed by 2 further cycles of centrifugation 500 g at 4° C. for 5 min and resuspension of the cell pellet in 50 ml of ice-cold DPBS. Finally, the cell pellet was resuspended in lysis buffer (1% SDS [w/v]; 0.1M HEPES; 10 mM MgCl₂; 0.1% Non ionic detergent P40; 100 ml protease inhibitor cocktail [P8340, Sigma]) and homogenisation performed by passage of lysate through a 18 G syringe needle 10 times. Protein concentrations were assayed relative to a Bovine serum albumin standard by a modified Lowry assay (DC assay, BioRAD) and 1 mg of total cellular protein transferred to a fresh tube and diluted to 1 mg/ml in acetate buffer (0.1M, pH 5.0).

### 2. Cloning and Expression of Target Proteins

[0380] cDNA Retrieval

[0381] Peptide sequences were searched by BlastP against the CELERA DISCOVERY SYSTEM (CDS) to identify the corresponding full-length open reading frames (ORFs). Each ORF sequence was then searched by BlastN against the Celera in-house human cDNA clone collection. For each sequence of interest, up to three clones were pulled and streaked onto LB/Ampicillin (100 ug/ml) plates. Plasmid DNA was isolated using Qiagen spin mini-prep kit and verified by restriction digest. Subsequently, the isolated plasmid DNA was sequence verified against the ORF reference sequence. Sequencing reactions were carried out using Applied Biosystems BIGDYE TERMINATOR kit followed by ethanol precipitation. Sequence data was collected using the Applied Biosystems 3100 GENETIC ANALYZER and analyzed by alignment to the reference sequence using the CLONE MANAGER alignment tool.

### PCR

[0382] PCR primers were designed to amplify the full-length ORF as well as any regions of the ORF that were interest for expression (antigenic or hydrophilic regions as determined by the CLONE MANAGER sequence analysis tool). Primers also contained 5′ and 3′ overhangs to facilitate cloning (see below). PCR reactions contained 2.5 units PLATINUM TAQ DNA POLYMERASE HIGH FIDELITY (Invitrogen), 50 ng cDNA plasmid template, 1 uM forward and reverse primers, 800 uM dNTP cocktail (Applied Biosystems) and 2 mM MgSO₄. After 20-30 cycles (94° C. for 30 seconds, 55° C. for 1 minutes and 73° C. for 2 minutes), product was verified and quantitated by agarose gel electrophoresis.

### Construction of Entry Clones

[0383] PCR products were cloned into an entry vector for use with the Gateway recombination based cloning system (Invitrogen). These vectors included pDonr221, pDonr201, pEntr/D-TOPO or pEntr/SD/D-TOPO and were used as described in the cloning methods below.

TOPO Cloning into pEntr/D-TOPO or pEntr/SD/D-TOPO

[0384] For cloning using this method, the forward PCR primer contained a 5′ overhang containing the sequence “CACC”. PCR products were generated as described above and cloned into the entry vector using the Invitrogen TOPO cloning kit. Reactions were typically carried out at room temperature for 10 minutes and subsequently transformed into TOP10 chemically competent cells (Invitrogen, CA). Candidate clones were picked, plasmid DNA was prepared using Qiagen spin mini-prep kit and screened using restriction digest. Inserts were subsequently sequence verified as described above.

Gateway Cloning into pDonr201 or pDonr221

[0385] For cloning using this method, PCR primers contained the following overhangs:

Forward 5′ overhang:
(SEQ ID NO: 1502)
5′-GGGGACAAGTTTGTACAAAAAAGCAGGCTTC-3′
Reverse 5′ overhang:
(SEQ ID NO: 1503)
5′-GGGGACCACTTTGTACAAGAAAGCTGGGT-3′

[0386] PCR products were generated as described above. ORFs were recombined into the entry vector using the Invitrogen GATEWAY BP CLONASE enzyme mix. Reactions were typically carried out at 25° C. for 1 hour, treated with Proteinase K at 37° C. for 10 minutes and transformed into Library Efficiency DH5 cc chemically competent cells (Invitrogen, CA). Candidate clones were picked, plasmid DNA was prepared using Qiagen spin mini-prep kit and screened using restriction digest. Inserts were subsequently sequence verified as described above.

### Construction of Expression Clones

[0387] ORFs were transferred from the entry construct into a series of expression vectors using the GATEWAY LR CLONASE enzyme mix. Reactions were typically carried out for 1 hour at 25° C., treated with Proteinase K at 37° C. for 10 minutes and subsequently transformed into Library Efficiency DH5α chemically competent cells (Invitrogen). Candidate clones were picked, plasmid DNA was prepared using Qiagen spin mini-prep kit and screened using restriction digest. Expression vectors included but were not limited to pDest14, pDest15, pDest17, pDest8, pDest10 and pDest20. These vectors allow expression in systems such as E. coli and recombinant baculovirus. Other vectors not listed here allow expression in yeast, mammalian cells, or in vitro.

Expression of Recombinant Proteins in E. coli

[0388] Constructs were transformed into one or more of the following host strains: BL21 S1, BL21 AI, (Invitrogen); Origami B (DE3), Origami B (DE3) pLysS, Rosetta (DE3), Rosetta (DE3) pLysS, Rosetta-Gami (DE3), Rosetta-Gami (DE3) pLysS, or Rosetta-Gami B (DE3) pLysS (Novagen). The transformants were grown in LB with or without NaCl and with appropriate antibiotics, at temperatures in the range of 20-37° C., with aeration. Expression was induced with the addition of IPTG (0.03-0.3 mM) or NaCl (75-300 mM) when the cells were in mid-log growth. Growth was continued for one to 24 hours post-induction. Cells were harvested by centrifugation in a Sorvall RC-3C centrifuge in a H6000A rotor for 10 minutes at 3000 rpm, at 4° C. Cell pellets were stored at −80° C.

### Expression of Recombinant Proteins Using Baculovirus

[0389] Recombinant proteins were expressed using baculovirus in Sf21 fall army worm ovarian cells. Recombinant baculoviruses were prepared using the BAC-TO-BAC SYSTEM (Invitrogen) per the manufacturer's instructions. Proteins were expressed on the large scale in Sf90011 serum-free medium (Invitrogen) in a 10 L bioreactor tank (27° C., 130 rpm, 50% dissolved oxygen for 48 hours).

### 3. Recombinant Protein Purification

[0390] Recombinant proteins are purified from E. coli and/or insect cells using a variety of standard chromatography methods. Briefly, cells are lysed using sonication or detergents. The insoluble material is pelleted by centrifugation at 10,000×g for 15 minutes. The supernatant is applied to an appropriate affinity column, e.g. His-tagged proteins are separated using a pre-packed chelating sepharose column (Pharmacia) or GST-tagged proteins are separated using a glutathione sepharose column (Pharmacia). After using the affinity column, proteins are further separated using various techniques, such as ion exchange chromatography (columns from Pharmacia) to separate on the basis of electrical charge or size exclusion chromatography (columns from Tosohaas) to separate on the basis of molecular weight, size and shape.

[0391] Expression and purification of the protein are also achieved using either a mammalian cell expression system or an insect cell expression system. The pUB6/V5-His vector system (Invitrogen, CA) is used to express GSCC in CHO cells. The vector contains the selectable bsd gene, multiple cloning sites, the promoter/enhancer sequence from the human ubiquitin C gene, a C-terminal V5 epitope for antibody detection with anti-V5 antibodies, and a C-terminal polyhistidine (6×.His) sequence for rapid purification on PROBOND resin (Invitrogen, CA). Transformed cells are selected on media containing blasticidin.

[0392] Spodoptera frugiperda (Sf9) insect cells are infected with recombinant Autographica californica nuclear polyhedrosis virus (baculovirus). The polyhedrin gene is replaced with the cDNA by homologous recombination and the polyhedrin promoter drives cDNA transcription. The protein is synthesized as a fusion protein with 6×His which enables purification as described above. Purified protein is used in the following activity and to make antibodies

### 4. Chemical Synthesis of Peptides

[0393] Proteins or portions thereof may be produced not only by recombinant methods, but also by using chemical methods well known in the art. Solid phase peptide synthesis may be carried out in a batchwise or continuous flow process which sequentially adds α-amino- and side chain-protected amino acid residues to an insoluble polymeric support via a linker group. A linker group such as methylamine-derivatized polyethylene glycol is attached to poly(styrene-co-divinylbenzene) to form the support resin. The amino acid residues are N-a-protected by acid labile Boc (t-butyloxycarbonyl) or base-labile Fmoc (9-fluorenylmethoxycarbonyl). The carboxyl group of the protected amino acid is coupled to the amine of the linker group to anchor the residue to the solid phase support resin. Trifluoroacetic acid or piperidine are used to remove the protecting group in the case of Boc or Fmoc, respectively. Each additional amino acid is added to the anchored residue using a coupling agent or pre-activated amino acid derivative, and the resin is washed. The full length peptide is synthesized by sequential deprotection, coupling of derivitized amino acids, and washing with dichloromethane and/or N,N-dimethylformamide. The peptide is cleaved between the peptide carboxy terminus and the linker group to yield a peptide acid or amide. (Novabiochem 1997/98 Catalog and Peptide Synthesis Handbook, San Diego Calif. pp. S1-S20). Automated synthesis may also be carried out on machines such as the 431A peptide synthesizer (ABI). A protein or portion thereof may be purified by preparative high performance liquid chromatography and its composition confirmed by amino acid analysis or by sequencing (Creighton (1984) Proteins, Structures and Molecular Properties, W H Freeman, New York N.Y.).

### 5. Antibody Development

### Polyclonal Antibody Preparations:

[0394] Polyclonal antibodies against recombinant proteins are raised in rabbits (Green Mountain Antibodies, Burlington, Vt.). Briefly, two New Zealand rabbits are immunized with 0.1 mg of antigen in complete Freund's adjuvant. Subsequent immunizations are carried out using 0.05 mg of antigen in incomplete Freund's adjuvant at days 14, 21 and 49. Bleeds are collected and screened for recognition of the antigen by solid phase ELISA and western blot analysis. The IgG fraction is separated by centrifugation at 20,000×g for 20 minutes followed by a 50% ammonium sulfate cut. The pelleted protein is resuspended in 5 mM Tris and separated by ion exchange chromatography. Fractions are pooled based on IgG content. Antigen-specific antibody is affinity purified using PIERCE AMINOLINK resin coupled to the appropriate antigen.

Isolation of Antibody Fragments Directed Against CCATs from a Library of scFvs

[0395] Naturally occurring V-genes isolated from human PBLs are constructed into a library of antibody fragments which contain reactivities against CCAT to which the donor may or may not have been exposed (see e.g., U.S. Pat. No. 5,885,793 incorporated herein by reference in its entirety).

[0396] Rescue of the Library: A library of scFvs is constructed from the RNA of human PBLs as described in PCT publication WO 92/01047. To rescue phage displaying antibody fragments, approximately 10⁹ E. coli harboring the phagemid are used to inoculate 50 ml of 2×TY containing 1% glucose and 100 .mu.g/ml of ampicillin (2×TY-AMP-GLU) and grown to an O.D. of 0.8 with shaking. Five ml of this culture is used to innoculate 50 ml of 2×TY-AMP-GLU., 2×10⁸ TU of delta gene 3 helper (M13 delta gene III, see PCT publication WO 92/01047) are added and the culture incubated at 37° C. for 45 minutes without shaking and then at 37° C. for 45 minutes with shaking. The culture is centrifuged at 4000 r.p.m. for 10 min. and the pellet resuspended in 2 liters of 2×TY containing 100 .mu.g/ml ampicillin and 50 ug/ml kanamycin and grown overnight. Phage are prepared as described in PCT publication WO 92/01047.

[0397] M13 delta gene III is prepared as follows: M13 delta gene III helper phage does not encode gene III protein, hence the phage (mid) displaying antibody fragments have a greater avidity of binding to antigen. Infectious M13 delta gene III particles are made by growing the helper phage in cells harboring a pUC19 derivative supplying the wild type gene III protein during phage morphogenesis. The culture is incubated for 1 hour at 37° C. without shaking and then for a further hour at 37° C. with shaking. Cells are spun down (IEC-Centra 8, 400 r.p.m. for 10 min), resuspended in 300 ml 2×TY broth containing 100 mug ampicillin/ml and 25 mug kanamycin/ml (2×TY-AMP-KAN) and grown overnight, shaking at 37° C. Phagre particles are purified and concentrated from the culture medium by two PEG-precipitations (Sambrook et al., 2001), resuspended in 2 ml PBS and passed through a 0.45 .mu.m filter (MINISART NML; Sartorius) to give a final concentration of approximately 10¹³ transducing units/ml (ampicillin-resistant clones).

[0398] Panning of the Library: Immunotubes (Nunc) are coated overnight in PBS with 4 ml of either 100 .mu.g/ml or 10 .mu.g/ml of a polypeptide of the present invention. Tubes are blocked with 2% Marvel-PBS for 2 hours at 37° C. and then washed 3 times in PBS. Approximately 1013 TU of phage is applied to the tube and incubated for 30 minutes at room temperature tumbling on an over and under turntable and then left to stand for another 1.5 hours. Tubes are washed 10 times with PBS 0.1% Tween-20 and 10 times with PBS. Phage are eluted by adding 1 ml of 100 mM triethylamine and rotating 15 minutes on an under and over turntable after which the solution is immediately neutralized with 0.5 ml of 1.0M Tris-HCl, pH 7.4. Phages are then used to infect 10 ml of mid-log E. coli TG1 by incubating eluted phage with bacteria for 30 minutes at 37° C. The E. coli are then plated on TYE plates containing 1% glucose and 100 .mu.g/ml ampicillin. The resulting bacterial library is then rescued with delta gene 3 helper phage as described above to prepare phage for a subsequent round of selection. This process is then repeated for a total of 4 rounds of affinity purification with tube-washing increased to 20 times with PBS, 0.1% Tween-20 and 20 times with PBS for rounds 3 and 4.

[0399] Characterization of Binders: Eluted phages from the 3rd and 4th rounds of selection are used to infect E. coli HB 2151 and soluble scFv is produced (Marks, et al., 1991) from single colonies for assay. ELISAs are performed with microtitre plates coated with either 10 .mu.g/ml of the polypeptide of the present invention in 50 mM bicarbonate pH 9.6. Clones positive in ELISA are further characterized by PCR fingerprinting (see, e.g., PCT publication WO 92/01047) and then by sequencing.

### Monoclonal Antibody Generation

[0400] i) Materials:

[0401] 1) Complete Media No Sera (CMNS) for washing of the myeloma and spleen cells; Hybridoma medium CM-HAT {Cell Mab (BD), 10% FBS (or HS); 5% Origen HCF (hybridoma cloning factor) containing 4 mM L-glutamine and antibiotics} to be used for plating hybridomas after the fusion.

[0402] 2) Hybridoma medium CM-HT (NO AMINOPTERIN) (Cell Mab (BD), 10% FBS 5% Origen HCF containing 4 mM L-glutamine and antibiotics) to be used for fusion maintenance are stored in the refrigerator at 4-6° C. The fusions are fed on days 4, 8, and 12, and subsequent passages. Inactivated and pre-filtered commercial Fetal Bovine serum (FBS) or Horse Serum (HS) are thawed and stored in the refrigerator at 4° C. and must be pretested for myeloma growth from single cells.

[0403] 3) The L-glutamine (200 mM, 100× solution), which is stored at −20° C. freezer, is thawed and warmed until completely in solution. The L-glutamine is dispensed into media to supplement growth. L-glutamine is added to 2 mM for myelomas, and 4 mM for hybridoma media. Further the Penicillin, Streptomycin, Amphotericin (antibacterial-antifungal stored at −20° C.) is thawed and added to Cell Mab Media to 1%.

[0404] 4) Myeloma growth media is CELL MAB MEDIA (CELL MAB MEDIA, QUANTUM YIELD from BD is stored in the refrigerator at 4° C. in the dark) which are added L-glutamine to 2 mM and antibiotic/antimycotic solution to 1% and is called CMNS.

[0405] 5) 1 bottle of PEG 1500 in Hepes (Roche, N.J.)

[0406] 6) 8-Azaguanine is stored as the dried powder supplied by SIGMA at −700° C. until needed. Reconstitute 1 vial/500 ml of media and add entire contents to 500 ml media (eg. 2 vials/litre).

[0407] 7) Myeloma Media is CM which has 10% FBS (or HS) and 8-Aza (1×) stored in the refrigerator at 4° C.

[0408] 8) Clonal cell medium D (Stemcell, Vancouver) contains HAT and methyl cellulose for semi-solid direct cloning from the fusion.

[0409] 9) Hybridoma supplements HT [hypoxanthine, thymidine] are to be used in medium for the section of hybridomas and maintenace of hybridomas through the cloning stages respectively.

[0410] 10) Origen HCF can be obtained directly from Igen and is a cell supernatant produced from a macrophage-like cell-line. It can be thawed and aliquoted to 15 ml tubes at 5 ml per tube and stored frozen at −20° C. Positive Hybridomas are fed HCF through the first subcloning and are gradually weaned. It is not necessary to continue to supplement unless you have a particularly difficult hybridoma clone. This and other additives have been shown to be more effective in promoting new hybridoma growth than conventional feeder layers.

[0411] ii) Procedure

[0412] To generate monoclonal antibodies, mice are immunized with 5-50 ug of antigen either intra-peritoneally (i.p.) or by intravenous injection in the tail vein (i.v.). Typically, the antigen used is a recombinant protein that is generated as described above. The primary immunization takes place 2 months prior to the harvesting of splenocytes from the mouse and the immunization is typically boosted by i.v. injection of 5-50 ug of antigen every two weeks. At least one week prior to expected fusion date, a fresh vial of myeloma cells is thawed and cultured. Several flasks at different densities are maintained in order that a culture at the optimum density is ensured at the time of fusion. The optimum density is determined to be 3−6×10⁵ cells/ml. Two to five days before the scheduled fusion, a final immunization is administered of ˜5 ug of antigen in PBS i.p. or i.v.

[0413] Myeloma cells are washed with 30 ml serum free media by centrifugation at 500× g at 4° C. for 5 minutes. Viable cell density is determined in resuspended cells using hemocytometry and vital stains. Cells resuspended in complete growth medium are stored at 37° C. during the preparation of splenocytes. Meanwhile, to test aminopterin sensitivity, 1×10⁶ myeloma cells are transferred to a 15 ml conical tube and centrifuged at 500 g at 4° C. for 5 minutes. The resulting pellet is resuspended in 15 ml of HAT media and cells plated at 2 drops/well on a 96 well plate.

[0414] To prepare splenocytes from immunized mice, the animals are euthanised and submerged in 70% EtOH. Under sterile conditions, the spleen is surgically removed and placed in 10 ml of RPMI medium supplemented with 20% fetal calf serum in a Petri dish. Cells are extricated from the spleen by infusing the organ with medium >50 times using a 21 g syringe.

[0415] Cells are harvested and washed by centrifugation (at 500× g at 4° C. for 5 minutes) with 30 ml of medium. Cells are resuspended in 10 ml of medium and the density of viable cells determined by hemocytometry using vital stains. The splenocytes are mixed with myeloma cells at a ratio of 5:1 (spleen cells: myeloma cells). Both the myeloma and spleen cells are washed 2 more times with 30 ml of RPMI-CMNS, and spun at 800 rpm for 12 minutes.

[0416] Supernatant is removed and cells are resuspended in 5 ml of RPMI-CMNS and are pooled to bring the volume to 30 ml and spundown as before. The cell pellet is broken up by gentle tapping and resuspended in 1 ml of BMB PEG1500 (prewarmed to 37° C.) added dropwise with a 1 cc needle over 1 minute.

[0417] RPMI-CMNS is added to the PEG cells slowly to dilute out the PEG. Cells are centrifuged and diluted in 5 ml of Complete media and 95 ml of Clonacell Medium D (HAT) media (with 5 ml of HCF). The cells are plated out at 10 ml per small petri plate.

[0418] Myeloma/HAT control. P is prepared as follows. Dilute about 1000 P3X63 Ag8.653 myeloma cells into 1 ml of mediu D and transfer into a single well of a 24 well plate. Plates are placed in incubator, with two plates inside of a large petri plate, with an additional petri plate full of distilled water, for 10-18 days under 5% CO₂ overlay at 37° C. Clones are picked from semisolid agarose into 96 well plates containing 150-200 ul of CM-HT. Supernatants are screened 4 days later in ELISA, and positive clones are moved up to 24 well plates. Heavy growth will require changing of the media at day 8 (+/−150 ml). One should further decrease the HCF to 0.5% (gradually-2%, then 1%, then 0.5%) in the cloning plates. (For further references see Kohler G, and C. Milstein).

[0419] Continuous cultures of fused cells secreting antibody of predefined specificity. 1975. Nature 256: 495-497; Lane, R. D. A short duration polyethylene glycol fusion technique for increasing production of monoclonal antibody-secreting hybridomas. 1985. J. Immunol. Meth. 81:223-228;

[0420] Harlow, E. and D. Lane. Antibodies: A laboratory manual. Cold Spring Harbour Laboratory Press. 1988; Kubitz, D. The Scripps Research Institute. La Jolla. Personal Communication; Zhong, G., Berry, J. D., and Choukri, S. (1996) Mapping epitopes of Chlamydia trachomatis neutralizing monoclonal antibodies using phage random peptide libraries. J. Indust. Microbiol. Biotech. 19, 71-76; Berry, J. D., Licea, A., Popkov, M., Cortez, X., Fuller, R., Elia, M., Kerwin, L., and C. F. Barbas III. (2003) Rapid monoclonal antibody generation via dendritic cell targeting in vivo. Hybridoma and Hybridomics 22 (1), 23-31.

### 6. mRNA Expression

### Validation in Tissues by TAQMAN

[0421] Expression of mRNA was quantitated by RT-PCR using TAQMAN® technology. The TAQMAN system couples a 5′ fluorogenic nuclease assay with PCR for real time quantitation. A probe was used to monitor the formation of the amplification product.

[0422] Total RNA was isolated from cancer model cell lines using the RNEASY Kit® (Qiagen) per manufacturer's instructions and included DNase treatment. Normal human tissue RNAs were acquired from commercial vendors (Ambion, Austin, Tex.; Stratagene, La Jolla, Calif., BioChain Institute, Newington, N.H.) as were RNAs from matched disease/normal tissues.

[0423] Target transcript sequences were identified for the differentially expressed peptides by searching the BlastP database. TAQMAN assays (PCR primer/probe set) specific for those transcripts were identified by searching the CELERA DISCOVERY SYSTEM™ (CDS) database. The assays were designed to span exon-exon borders and do not amplify genomic DNA.

[0424] The TAQMAN primers and probe sequences were as designed by Applied Biosystems (AB) as part of the ASSAYS ON DEMAND™ product line or by custom design through the AB ASSAYS BY DESIGN^{SM} service.

[0425] RT-PCR was accomplished using AMPLITAQGOLD and MULTISCRIBE reverse transcriptase in the ONE STEP RT-PCR MASTER MIX reagent kit (AB) according to the manufacturer's instructions. Probe and primer concentrations are 250 nM and 900 nM, respectively, in a 15 μl reaction. For each experiment, a master mix of the above components was made and aliquoted into each optical reaction well. Eight nanograms of total RNA was the template. Each sample was assayed in triplicate. Quantitative RT-PCR is performed using the ABI Prism® 7900HT SEQUENCE DETECTION SYSTEM (SDS). Cycling parameters follow: 48° C. for 30 min. for one cycle; 95° C. for 10 min for one cycle; 95° C. for 15 sec, 60° C. for 1 min. for 40 cycles.

[0426] The SDS software calculates the threshold cycle (C_{T}) for each reaction, and C_{T} values were used to quantitate the relative amount of starting template in the reaction. The C_{T} values for each set of three reactions were averaged for all subsequent calculations.

[0427] Data were analyzed for fold differences in expression using an endogenous control for normalization, and measuring expression relative to a normal tissue or normal cell line reference. The choice of endogenous control was determined empirically by testing various candidates against the cell line and tissue RNA panels and selecting the one with the least variation in expression. Relative changes in expression were quantitated using the 2^{-ΔΔCT} Method. Livak, K. J. and Schmittgen, T. D. (2001) Methods 25: 402-408; User bulletin #2: ABI Prism 7700 Sequence Detection System.

### Validation by Tissue Flow Cytometry Analysis

[0428] Post tissue processing, cells were sorted by flow cytometry known in the art to enrich for epithelial cells. Alternatively, cells isolated from colon tissue were stained directly with EpCAM (for epithelial cells) and the specific antibody to CCAT. Cell numbers and viability were determined by PI exclusion (GUAVA) for cells isolated from both normal and tumor colon tissue. A minimum of 0.5×10⁶ cells were used for each analysis. Cells were washed once with Flow Staining Buffer (0.5% BSA, 0.05% NaN₃ in D-PBS). To the cells, 20 ul of each antibody for CCAT were added. An additional 5 ul of EpCAM antibody conjugated to APC were added when unsorted cells were used in the experiment. Cells were incubated with antibodies for 30 minutes at 4° C. Cells were washed once with Flow Staining Buffer and either analyzed immediately on the LSR flow cytometry apparatus or fixed in 1% formaldehyde and store at 4° C. until LSR analysis. The antibodies used to detect CCAT targets were all purchased by BD Biosciences and PE-conjugated. The isotype control antibody used for these experiments was PE-conjugated mouse IgG1k.

### Western Analysis

[0429] Western blot analysis of target proteins are carried out using whole cell or tissue extracts prepared. To make cell extracts, the cells are resuspended in Lysis buffer (125 mM Tris, pH 7.5, 150 mM NaCl, 2% SDS, 5 mM EDTA, 0.5% NP-40) and passed through a 20-gauge needle. Lysates are centrifuged at 5,000×g for 5 minutes at 4° C. The supernatants are collected and a protease inhibitor cocktail (Sigma) is added. The PIERCE BCA assay is used to quantitate total protein. Samples are separated by SDS-PAGE and transferred to either a nitrocellulose or PVDF membrane. The WESTERN BREEZE kit from Invitrogen is used for Western blot analysis. Primary antibodies are either purchased from commercially available sources or prepared using one of the methods described in Section 5. For this application, antibodies are typically diluted 1:500 to 1:10,000 in diluent buffer. Blots were developed using PIERCE NBT.

### Results

[0430] A range of CCAT targets were validated by TAQMAN mRNA expression. Targets such as DPEP-1 (FIG. 3) is shown to be overexpressed at mRNA level in colon tumor tissues.

[0431] FACS analysis in colon tumor tissue showed that the targets include, but are not limited to Prominin-1 (FIG. 4) and Integrin beta-4 (FIG. 5) have high copy number in the colon tissue samples.

### 7. Detection and Diagnosis of CCAT by Liquid Chromatography and Mass Spectrometry (LC/MS)

[0432] The proteins from cells are prepared by methods known in the art (R. Aebersold Nature Biotechnology Volume 21 Number 6 Jun. 2003).

[0433] The differential expression of proteins in disease and healthy samples are quantitated using Mass Spectrometry and ICAT (Isotope Coded Affinity Tag) labeling, which is known in the art. ICAT is an isotope label technique that allows for discrimination between two populations of proteins, such as a healthy and a disease sample that are pooled together for experimental purposes or two acquisitions of the same sample for classification of true sample peptides from LC/MS noise artifacts. The LC/MS spectra are collected for the labeled samples and processed using the following steps:

[0434] The raw scans from the LC/MS instrument are subjected to peak detection and noise reduction software. Filtered peak lists are then used to detect “features” corresponding to specific peptides from the original sample(s). Features are characterized by their mass/charge, charge, retention time, isotope pattern and intensity.

[0435] Similar experiments are repeated in order to increase the confidence in detection of a peptide. These multiple acquisitions are computationally aggregated into one experiment. Experiments involving healthy and disease samples used the known effects of the ICAT label to classify the peptides as originating from a particular sample or from both samples. The intensity of a peptide present in both healthy and disease samples is used to calculate the differential expression, or relative abundance, of the peptide. The intensity of a peptide found exclusively in one sample is used to calculate a theoretical expression ratio for that peptide (singleton). Expression ratios are calculated for each peptide of each replicate of the experiment (for example, Table 1).

[0436] Statistical tests are performed to assess the robustness of the data and select statistically significant differentials. To assess general quality of the data, one: a) ensure that similar features are detected in all replicates of the experiment; b) assess the distribution of the log ratios of all peptides (a Gaussian was expected); c) calculate the overall pair wise correlations between ICAT LC/MS maps to ensure that the expression ratios for peptides are reproducible across the multiple replicates; d) aggregate multiple experiments in order to compare the expression ratio of a peptide in multiple diseases or disease samples.

### 8. Expression Validation by IHC in Tissue Sections

### Tissue Sections

[0437] Paraffin embedded, fixed tissue sections were obtained from a panel of normal tissues (Adrenal, Bladder, Lymphocytes, Bone Marrow, Breast, Cerebellum, Cerebral cortex, Colon, Endothelium, Eye, Fallopian tube, Small Intestine, Heart, Kidney (glomerulus, tubule), Liver, Lung, Testes and Thyroid) as well as 30 tumor samples with matched normal adjacent tissues from pancreas, lung, colon, prostate, ovarian and breast. In addition, other tissues are selected for testing such as bladder renal, hepatocellular, pharyngeal and gastric tumor tissues.

[0438] Esophageal replicate sections were also obtained from numerous tumor types (Bladder Cancer, Lung Cancer, Breast Cancer, Melanoma, Colon Cancer, Non-Hodgkins Lymphoma, Endometrial Cancer, Ovarian Cancer, Head and Neck Cancer, Prostate Cancer, Leukemia [ALL and CML] and Rectal Cancer). Sections were stained with hemotoxylin and eosin and histologically examined to ensure adequate representation of cell types in each tissue section.

[0439] An identical set of tissues will be obtained from frozen sections and are used in those instances where it is not possible to generate antibodies that are suitable for fixed sections. Frozen tissues do not require an antigen retrieval step.

### Paraffin Fixed Tissue Sections

[0440] Hemotoxylin and Eosin staining of paraffin embedded, fixed tissue sections.

[0441] Sections were deparaffinized in 3 changes of xylene or xylene substitute for 2-5 minutes each. Sections were rinsed in 2 changes of absolute alcohol for 1-2 minutes each, in 95% alcohol for 1 minute, followed by 80% alcohol for 1 minute. Slides were washed well in running water and stained in Gill solution 3 hemotoxylin for 3 to 5 minutes. Following a vigorous wash in running water for 1 minute, sections were stained in Scott's solution for 2 minutes. Sections were washed for 1 min in running water then conterstained in Eosin solution for 2-3 minutes depending upon development of desired staining intensity. Following a brief wash in 95% alcohol, sections were dehydrated in three changes of absolute alcohol for 1 minute each and three changes of xylene or xylene substitute for 1-2 minutes each. Slides were coverslipped and stored for analysis.

### Optimisation of Antibody Staining

[0442] For each antibody, a positive and negative control sample are generated using data from the ICAT analysis of the colon cancer cell lines/tissues. Cells are selected that are known to express low levels of a particular target as determined from the ICAT data. This cell line is the reference normal control. Similarly, a colon tumor line is selected that is determined to overexpress the target is selected.

### Antigen Retrieval

[0443] Sections were deparaffinized and rehydrated by washing 3 times for 5 minutes in xylene; two times for 5 minutes in 100% ethanol; two times for 5 minutes in 95% ethanol; and once for 5 minutes in 80% ethanol. Sections were then placed in endogenous blocking solution (methanol+2% hydrogen peroxide) and incubated for 20 minutes at room temperature. Sections were rinsed twice for 5 minutes each in deionized water and twice for 5 minutes in phosphate buffered saline (PBS), pH 7.4. Alternatively, where necessary sections were deparrafinized by High Energy Antigen Retrieval as follows: sections were washed three times for 5 minutes in xylene; two times for 5 minutes in 100% ethanol; two times for 5 minutes in 95% ethanol; and once for 5 minutes in 80% ethanol. Sections were placed in a Coplin jar with dilute antigen retrieval solution (10 mM citrate acid, pH 6). The Coplin jar containing slides was placed in a vessel filled with water and microwaved on high for 2-3 minutes (700 watt oven). Following cooling for 2-3 minutes, steps 3 and 4 were repeated four times (depending on tissue), followed by cooling for 20 minutes at room temperature. Sections were then rinsed in deionized water, two times for 5 minutes, placed in modified endogenous oxidation blocking solution (PBS+2% hydrogen peroxide) and rinsed for 5 minutes in PBS.

### Blocking and Staining

[0444] Sections were blocked with PBS/1% bovine serum albumin (PBA) for 1 hour at room temperature followed by incubation in normal serum diluted in PBA (2%) for 30 minutes at room temperature to reduce non-specific binding of antibody. Incubations were performed in a sealed humidity chamber to prevent air-drying of the tissue sections. (The choice of blocking serum was the same as the species of the biotinylated secondary antibody). Excess antibody is gently removed by shaking and sections covered with primary antibody diluted in PBA and incubated either at room temperature for 1 hour or overnight at 4° C. (Care was taken that the sections do not touch during incubation). Sections were rinsed twice for 5 minutes in PBS, shaking gently. Excess PBS was removed by gently shaking. The sections were covered with diluted biotinylated secondary antibody in PBA and incubated for 30 minutes to 1 hour at room temperature in the humidity chamber. If using a monoclonal primary antibody, addition of 2% rat serum was used to decrease the background on rat tissue sections. Following incubation, sections were rinsed twice for 5 minutes in PBS, shaking gently. Excess PBS was removed and sections incubated for 1 hour at room temperature in VECTASTAIN ABC reagent (as per kit instructions). The lid of the humidity chamber was secured during all incunations to ensure a moist environment. Sections were rinsed twice for 5 minutes in PBS, shaking gently.

### Develop and Counterstain

[0445] Sections were incubated for 2 minutes in peroxidase substrate solution that was made up immediately prior to use as follows:
[0446] 10 mg diaminobenzidine (DAB) dissolved in 10 m150 mM sodium phosphate buffer, pH 7.4;
[0447] 12.5 microliters 3% CoCl₂/NiCl₂ in deionized water; and
[0448] 1.25 microliters hydrogen peroxide

[0449] Slides were rinsed well three times for 10 min in deionized water and counterstained with 0.01% Light Green acidified with 0.01% acetic acid for 1-2 minutes depending on intensity of counterstain desired.

[0450] Slides were rinsed three times for 5 minutes with deionized water and dehydrated two times for 2 minutes in 95% ethanol; two times for 2 minutes in 100% ethanol; and two times for 2 minutes in xylene. Stained slides were mounted for visualization by microscopy.

### Results:

[0451] DPEP-1 and Integrin beta 4 are shown to have high expression in tumor tissue.

### 9. IHC Staining of Frozen Tissue Sections

[0452] Fresh tissues are embedded carefully in OCT in plastic mold, without trapping air bubbles surrounding the tissue. Tissues are frozen by setting the mold on top of liquid nitrogen until 70-80% of the block turns white at which point the mold is placed on dry ice. The frozen blocks were stored at −80° C. Blocks are sectioned with a cryostat with care taken to avoid warming to greater than −10° C. Initially, the block is equilibrated in the cryostat for about 5 minutes and 6-10 mm sections are cut sequentially. Sections are allowed to dry for at least 30 minutes at room temperature. Following drying, tissues are stored at 4° C. for short term and 80° C. for long term storage.)

[0453] Sections are fixed by immersing in acetone jar for 1-2 minutes at room temperature, followed by drying at room temperature. Primary antibody is added (diluted in 0.05 M Tris-saline [0.05 M Tris, 0.15 M NaCl, pH 7.4], 2.5% serum) directly to the sections by covering the section dropwise to cover the tissue entirely. Binding is carried out by incubation a chamber for 1 hour at room temperature. Without letting the sections dry out, the secondary antibody (diluted in Tris-saline/2.5% serum) is added in a similar manner to the primary and incubated as before (at least 45 minutes).

[0454] Following incubation, the sections are washed gently in Tris-saline for 3-5 minutes and then in Tris-saline/2.5% serum for another 3-5 minutes. If a biotinylated primary antibody is used, in place of the secondary antibody incubation, slides are covered with 100 ul of diluted alkaline phosphatase conjugated streptavidin, incubated for 30 minutes at room temperature and washed as above. Sections are incubated with alkaline phosphatse substrate (1 mg/ml Fast Violet; 0.2 mg/ml Napthol AS-MX phosphate in Tris-Saline pH 8.5) for 10-20 minutes until the desired positive staining is achieved at which point the reaction is stopped by washing twice with Tris-saline. Slides are counter-stained with Mayer's hematoxylin for 30 seconds and washed with tap water for 2-5 minutes. Sections are mounted with Mount coverslips and mounting media.

### 10. Assay for Antibody Dependent Cellular Cytotoxicity

[0455] Cultured tumor cells are labeled with 100 μCi ⁵¹Cr for 1 hour (Livingston, P. O., Zhang, S., Adluri, S., Yao, T.-J., Graeber, L., Ragupathi, G., Helling, F., & Fleischer, M. (1997). Cancer Immunol. Immunother. 43, 324-330). After washing three times with culture medium, cells are resuspended at 10⁵/ml, and 100 μl/well are plated onto 96-well round-bottom plates. A range of antibody concentrations are applied to the wells, including an isotype control together with donor peripheral blood mononuclear cells that are plated at a 100:1 and 50:1 ratio. After an 18-h incubation at 37° C., supernatant (30 μl/well) is harvested and transferred onto LUMAPLATE 96 (Packard), dried, and read in a Packard TOP-COUNT NXT γ counter. Each measurement is carried out in triplicate. Spontaneous release is determined by cpm of tumor cells incubated with medium and maximum release by cpm of tumor cells plus 1% TRITON X-100 (Sigma). Specific lysis is defined as: % specific lysis=[(experimental release−spontaneous release)/(maximum release−spontaneous release)]×100. The percent ADCC is expressed as peak specific lysis postimmune subtracted by preimmune percent specific lysis. A doubling of the ADCC to >20% is considered significant.

### 11. Assay for Complement Dependent Cytotoxicity

[0456] Chromium release assays to assess complement-mediated cytotoxicity are performed for each patient at various time points; Dickler, M. N., Ragupathi, G., Liu, N. X., Musselli, C., Martino, D. J., Miller, V. A., Kris, M. G., Brezicka, F. T., Livingston, P. O. & Grant, S. C. (1999) Clin. Cancer Res. 5, 2773-2779. Cultured tumor cells are washed in FCS-free media two times, resuspended in 500 μl of media, and incubated with 100 μCi ⁵¹Cr per 10 million cells for 2 h at 37° C. The cells are then shaken every 15 min for 2 h, washed 3 times in media to achieve a concentration of approximately 20,000 cells/well, and then plated in round-bottom plates. The plates contain either 50 μl cells plus 50 μl monoclonal antibody, 500 cells plus serum (pre- and posttherapy), or 50 μl cells plus mouse serum as a control. The plates are incubated in a cold room on a shaker for 45 min. Human complement of a 1:5 dilution (resuspended in 1 ml of ice-cold water and diluted with 3% human serum albumin) is added to each well at a volume of 100 μl. Control wells include those for maximum release of isotope in 10% TRITON X-100 (Sigma) and for spontaneous release in the absence of complement with medium alone. The plates are incubated for 2 h at 37° C., centrifuged for 3 min, and then 100 μl of supernatant is removed for radioactivity counting. The percentage of specific lysis is calculated as follows: % cytotoxicity=[(experimental release-spontaneous release)/(maximum release-spontaneous release)]×100. A doubling of the CDC to >20% is considered significant.

### 12. In vitro Assays In Cell Lines

[0457] Lipofectamine was purchased from Invitrogen (Carlsbad, Calif.) and GENE SILENCER from Gene Therapy Systems (San Diego, Calif.). Synthetic siRNA oligonucleotides were from Dharmacon (Lafayette, Colo.), Qiagen (Valencia, Calif.) or Ambion (Austin, Tex.) RNEASY 96 Kit was purchased from Qiagen (Valencia, Calif.). APOP-ONE HOMOGENEOUS CASPASE-3/7 kit and CELLTITER 96 AQUEOUS ONE SOLUTION CELL PROLIFERATION ASSAY were both purchased from Promega (Madison, Wis.). Function blocking antibodies were purchased from Chemicon (Temecula, Calif.), Biotrend (Cologne, Germany) or Alexis Corporation (San Diego, Calif.). Cell invasion assay kits from purchased from Chemicon (Temecula, Calif.). RIBOGREEN RNA Quantitation Kit was purchased from Molecular probes (Eugene, Oreg.).

### RNAi

[0458] RNAi was performed by using SMARTPOOLS (Dharmacon), 4-for Silencing siRNA duplexes (Qiagen) or scrambled negative control siRNA (Ambion). Transient transfections were carried out in triplicate by using either LIPOFECTAMINE 2000 from Invitrogen (Carlsbad, Calif.) or by using GENE SILENCER from Gene Therapy Systems (San Diego, Calif.) in methods described below. 1 to 4 days after transfections, total RNA was isolated by using the RNEASY 96 Kit (Qiagen) according to manufacturer's instructions and expression of mRNA was quantitated by using TAQMAN technology. Protein expression levels were examined by flow cytometry and apoptosis and proliferation assays were performed daily using APOP-ONE HOMOGENEOUS CASPASE-3/7 kit and CELLTITER 96 AQUEOUS ONE SOLUTION CELL PROLIFERATION ASSAY (see protocols below).

[0459] i) RNAi Transfections—Lipofectamine 2000

[0460] Transient transfections were carried out on sub-confluent colon cancer cell lines as previously described. Elbashir, S. M. et al. (2001) Nature 411: 494-498; Caplen, N. J. et al. (2001) Proc Natl Acad Sci USA 98: 9742-9747; Sharp, P. A. (2001) Genes and Development 15: 485-490. Synthetic RNA to gene of interest or scrambled negative control siRNA was transfected using lipofectamine according to manufacturer's instructions. Cells were plated in 96 well plates in antibiotic free medium. The next day, the transfection reagent and siRNA were prepared for transfections as follows: Each 0.1-1 ul of LIPOFECTAMINE 2000 and 10-150 mM siRNA were resuspended 25 ul serum-free media and incubated at room temperature for 5 minutes. After incubation, the diluted siRNA and the LIPOFECTAMINE 2000 were combined and incubated for 20 minutes at room temperature. The cells were then washed and the combined SIRNA-LIPOFECTAMINE 2000 reagent added. After further 4 hours incubation, 50 ul serum containing medium was added to each well. 1 and 4 days after transfection, expression of mRNA was quantitated by RT-PCR using TAQMAN technology and protein expression levels were examined by flow cytometry. Apoptosis and proliferation assays were performed daily using APOP-ONE HOMOGENEOUS CASPASE-3/7 kit and CELLTITER 96 AQUEOUS ONE SOLUTION CELL PROLIFERATION ASSAY (see protocols below).

[0461] ii) RNAi Transfections—GeneSilencer

[0462] Transient transfections were carried out on sub-confluent colon cancer cell lines as previously described. Elbashir, S. M. et al. (2001) Nature 411: 494-498; Caplen, N. J. et al. (2001) Proc Natl Acad Sci USA 98: 9742-9747; Sharp, P. A. (2001) Genes and Development 15: 485-490. Synthetic RNA to gene of interest or scrambled negative control siRNA was transfected using GENE SILENCER according to manufacturer's instructions. Cells were plated in 96 well plates in antibiotic free medium. The next day, the transfection reagent and the synthetic siRNA were prepared for transfection as follows: predetermined amount of GENE SILENCER was diluted in serum-free media to a final volume of 20 ul per well. After resuspending 10-150 mM siRNA in 20 ul serum-free media, the reagents were combined and incubated at room temperature for 5-20 minutes. After incubation, the siRNA-GENE SILENCER reagent was added to each well and incubated in a 37° C. incubator for 4 hours before an equal volume of serum containing media was added back to the cultured cells. The cells were then incubated for 1 to 4 days before mRNA, protein expression and effects on apoptosis and proliferation were examined.

### Testing of Functional Blocking Antibodies

[0463] Sub-confluent colon cancer cell lines are serum-starved overnight. The next day, serum-containing media is added back to the cells in the presence of 5-50 ng/ml of function blocking antibodies. After 2 or 5 days incubation at 37° C. 5% CO₂, antibody binding is examined by flow cytometry and apoptosis and proliferation are examined by using protocols described below.

### Apoptosis

[0464] Apoptosis assay was performed by using the APOP-ONE HOMOGENEOUS CASPASE-3/7 kit from Promega. Briefly, the caspase-3/7 substrate was thawed to room temperature and diluted 1:100 with buffer. The diluted substrate was then added 1:1 to cells, control or blank. The plates were then placed on a plate shaker for 30 minutes to 18 hours at 300-500 rpm. The fluorescence of each well was then measured at using an excitation wavelength of 485+/−20 nm and an emission wavelength of 530+/−25 nm. (FIGS. 7 and 8 and 9).

### Proliferation-MTS

[0465] Proliferation assay was performed by using the CELLTITER 96 AQUEOUS ONE SOLUTION CELL PROLIFERATION ASSAY kit from Promega. 20 ul of CELLTITER 96 AQUEOUS ONE SOLUTION was added to 100 ul of culture medium. The plates were then incubated for 1-4 hours at 37° C. in a humidified 5% CO₂ incubator. After incubation, the change in absorbance was read at 490 nm.

### Proliferation-Alamar Blue

[0466] Proliferation assay was performed by using the Alamar Blue assay from Biosource. 10 ul of Alamar blue reagent was added to 100 ul of cells in culture medium. The plates were then incubated for 1-4 hours at 37° C. in a humidified 5% CO₂ incubator. After incubation, the change in fluorescence was measured at using an excitation wavelength of 530 nm and an emission wavelength of 595 nm. Examples of the results are shown in FIG. 6, FIG. 10 with Defensin alpha 1.

### Cell Invasion

[0467] Cell invasion assay is performed by using the 96 well cell invasion assay kit available from Chemicon. After the cell invasion chamber plates are adjusted to room temperature, 100 ul serum-free media is added to the interior of the inserts. 1-2 hours later, cell suspensions of 1×10⁶ cells/ml are prepared. Media is then carefully removed from the inserts and 100 ul of prepared cells are added into the insert +/−0 to 50 ng function blocking antibodies. The cells are pre-incubated for 15 minutes at 37° C. before 150 ul of media containing 10% FBS is added to the lower chamber. The cells are then incubated for 48 hours at 37° C. After incubation, the cells from the top side of the insert are discarded and the invasion chamber plates are then placed on a new 96-well feeder tray containing 150 ul of pre-warmed cell detachment solution in the wells. The plates are incubated for 30 minutes at 37° C. and are periodically shaken. Lysis buffer/dye solution (4 ul CYQUANT DYE/300 ul 4× lysis buffer) is prepared and added to each well of dissociation buffer/cells on feeder tray. The plates are incubated for 15 minutes at room temperature before 150 ul is transferred to a new 96-well plate. Fluorescence of invading cells is then read at 480 nm excitation and 520 nm emissions.

### Receptor Internalization

[0468] For quantification of receptor internalization, ELISA assays are performed essentially as described by Daunt et al. (Daunt, D. A., Hurtz, C., Hein, L., Kallio, J., Feng, F., and Kobilka, B. K. (1997) Mol. Pharmacol. 51, 711-720.) The cell lines are plated at 6×10⁵ cells per in a 24-well tissue culture dishes that have previously been coated with 0.1 mg/ml poly-L-lysine. The next day, the cells are washed once with PBS and incubated in DMEM at 37° C. for several minutes. Agonist to the cell surface target of interest is then added at a pre-determined concentration in prewarmed DMEM to the wells. The cells are then incubated for various times at 37° C. and reactions are stopped by removing the media and fixing the cells in 3.7% formaldehyde/TBS for 5 min at room temperature. The cells are then washed three times with TBS and nonspecific binding blocked with TBS containing 1% BSA for 45 min at room temperature. The first antibody is added at a pre-determined dilution in TBS/BSA for 1 hr at room temperature. Three washes with TBS followed, and cells are briefly reblocked for 15 min at room temperature. Incubation with goat anti-mouse conjugated alkaline phosphatase (Bio-Rad) diluted 1:1000 in TBS/BSA is carried out for 1 h at room temperature. The cells are washed three times with TBS and a colorimetric alkaline phosphatase substrate is added. When the adequate color change is reached, 100-0 samples are taken for colorimetric readings.

mRNA Expression

[0469] RNA was obtained as the method set forth above. Expression of mRNA was quantitated by RT-PCR using TAQMAN® technology. Total RNA was isolated from cancer model cell lines using the RNEASY 96 kit (Qiagen) per manufacturer's instructions and included DNase treatment. Target transcript sequences were identified for the differentially expressed peptides by searching the BlastP database. TAQMAN assays (PCR primer/probe set) specific for those transcripts were identified by searching the CELERA DISCOVERY SYSTEM™ (CDS) database. The assays were designed to span exon-exon borders and do not amplify genomic DNA. The TAQMAN primers and probe sequences were as designed by Applied Biosystems (AB) as part of the ASSAYS ON DEMAND™ product line or by custom design through the AB ASSAYS BY DESIGN^{SM} service. RT-PCR was accomplished using AMPLITAQGOLD and MULTISCRIBE reverse transcriptase in the ONE STEP RT-PCR MASTER MIX reagent kit (AB) according to the manufacturers instructions. Probe and primer concentrations are 900 nM and 250 nM, respectively, in a 250 reaction. For each experiment, a master mix of the above components was made and aliquoted into each optical reaction well. 5 ul of total RNA was the template. Each sample was assayed in triplicate. Quantitative RT-PCR was performed using the ABI Prism® 7900HT SEQUENCE DETECTION SYSTEM (SDS). Cycling parameters follow: 48° C. for 30 min. for one cycle; 95° C. for 10 min for one cycle; 95° C. for 15 sec, 60° C. for 1 min. for 40 cycles.

[0470] The SDS software calculates the threshold cycle (C_{T}) for each reaction, and C_{T} values are used to quantitate the relative amount of starting template in the reaction. The C_{T} values for each set of three reactions are averaged for all subsequent calculations.

[0471] Total RNA was quantitated by using RIBOGREEN RNA Quantitation Kit according to manufacturer's instructions and the % mRNA expression was calculated using total RNA for normalization. Percentage knockdown was then calculated relative to the no addition control.

### Results:

[0472] Knockdown of Leukocyte Elastase, Defensin alpha 1, oligosaccharyl transferase 3, Wolframin, Ectonucleoside triphosphate diphosphohydrolase 2, T-cell surface glycoprotein CD5 induce apoptosis or inhibit cell proliferation in vitro.

### 13. In Vivo Studies by Using Antibodies

[0473] Treatment of Colon Cancer Cells with Monoclonal Antibodies.

[0474] Colon cancer cells are seeded at a density of 4×10⁴ cells per well in 96-well microtiter plates and allowed to adhere for 2 hours. The cells are then treated with different concentrations of anti-CCAT monoclonal antibody (Mab) or irrelevant isotype matched (anti-rHuIFN-γ Mab) at 0.05, 0.5 or 5.0 mug/ml. After a 72 hour incubation, the cell monolayers are stained with crystal violet dye for determination of relative percent viability (RPV) compared to control (untreated) cells. Each treatment group consists of replicates. Cell growth inhibition is monitored.

Treatment of NIH 3T3 Cells Overexpression CCAT Protein with Monoclonal Antibodies.

[0475] NIH 3T3 expressing CCAT protein are treated with different concentrations of anti-CCAT MAbs. Cell growth inhibition is monitored.

In Vivo Treatment of NIH 3T3 Cells Overexpressing CCAT with Anti-CCAT Monoclonal Antibodies.

[0476] NIH 3T3 cells transfected with either a CCAT expression plasmid or the neo-DHFR vector are injected into nu/nu (athymic) mice subcutaneously at a dose of 10⁶ cells in 0.1 ml of phosphate-buffered saline. On days 0, 1, 5 and every 4 days thereafter, 100 mug (0.1 ml in PBS) of either an irrelevant or anti-CCAT monoclonal antibody of the IG2A subclass is injected intraperitoneally. Tumor occurrence and size are monitored for 1 month period of treatment.

[0477] All publications and patents mentioned in the above specification are herein incorporated by reference. Various modifications and variations of the described method and system of the invention will be apparent to those skilled in the art without departing from the scope and spirit of the invention. Although the invention has been described in connection with specific preferred embodiments, it should be understood that the invention as claimed should not be unduly limited to such specific embodiments. Indeed, various modifications of the above-described modes for carrying out the invention, which are obvious to those skilled in the field of molecular biology or related fields, are intended to be within the scope of the following claims.

1. An isolated protein comprising an amino acid sequence selected from the group consisting of SEQ ID NOS:1-683 and 1332-1501.

2. A composition comprising the protein of claim 1 and a pharmaceutically acceptable carrier.

3. An isolated nucleic acid molecule comprising a nucleotide sequence selected from the group consisting of:
a) SEQ ID NOS:684-1331;
b) nucleotide sequences that encode a protein comprising an amino acid sequence selected from the group consisting of SEQ ID NOS:1-683 and 1332-1501; and
c) nucleotide sequences that are completely complementary to the nucleotide sequences of a) or b).

4. An isolated RNAi or antisense nucleic acid molecule that selectively binds to the nucleic acid molecule of claim 3.

5. An isolated antibody that selectively binds to the protein of claim 1.

6. The antibody of claim 5, wherein the antibody is at least one of a monoclonal, polyclonal, fully human, humanized, chimeric, single-chain, or anti-idiotypic antibody.

7. A cell line, hybridoma, phage, or transgenic organism that produces the antibody of claim 5.

8. The antibody of claim 5, wherein the antibody is coupled to a composition selected from the group consisting of detectable substances and therapeutic agents.

9. A composition comprising the antibody of claim 5 and a pharmaceutically acceptable carrier.

10. An isolated antibody fragment of the antibody of claim 5, wherein the antibody fragment comprises a fragment selected from the group consisting of:
a) an Fab fragment;
b) an F(ab′)₂ fragment; and
c) an Fv fragment.

11. A method of modulating cell proliferation or apoptosis, the method comprising contacting a cell with the antibody of claim 5.

12. The method of claim 11, wherein the method comprises either inhibiting proliferation of colon cancer cells or stimulating apoptosis of colon cancer cells.

13. A method of modulating cell proliferation or apoptosis, the method comprising contacting a cell with the RNAi or antisense nucleic acid molecule of claim 4.

14. A method of detecting the protein of claim 1 in a sample, the method comprising contacting the sample with an isolated antibody that selectively binds to the protein and determining whether the antibody binds to the protein.

15. A method of detecting the nucleic acid molecule of claim 3 in a sample, the method comprising contacting the sample with an oligonucleotide that specifically hybridizes to the nucleic acid molecule and determining whether the oligonucleotide binds to the nucleic acid molecule.

16. A method of diagnosing, prognosing, or determining risk of colon cancer in a subject, the method comprising detecting at least one molecule in a sample, wherein the presence or abundance of the molecule is indicative of colon cancer, and wherein the molecule is selected from the group consisting of:
a) proteins comprising an amino acid sequence selected from the group consisting of SEQ ID NOS:1-683 and 1332-1501;
b) antibodies that selectively bind to the protein of a);
c) nucleic acid molecules comprising a nucleotide sequence selected from the group consisting of SEQ ID NOS:684-1331 and nucleotide sequences that encode the protein of a); and
d) nucleic acid molecules comprising a nucleotide sequence that is completely complementary to the nucleic acid molecule of c).

17. A method of treating colon cancer, the method comprising administering a therapeutically effective amount of the antibody of claim 5 to a subject.

18. A method of screening agents, the method comprising contacting the protein of claim 1 or a cell that expresses the protein with an agent, and assaying for whether the agent binds to the protein or modulates the function, activity, or expression of the protein.

19. A composition comprising the agent identified by the method of claim 18 and a pharmaceutically acceptable carrier.

20. A method of determining or predicting the effectiveness of a treatment or selecting a treatment for administration to a subject having colon cancer, the method comprising detecting the presence, abundance, or activity of the protein of claim 1 in a sample and determining or predicting the effectiveness of the treatment or selecting the treatment for administration based on the presence, abundance, or activity of the protein.

The application's sequence listing, which the Patent Office published only in electronic form, follows.

SEQUENCE LISTING (1503 sequences)

SEQ ID NO: 1 - protein, 193 aa, Homo sapiens
MAAIRKKLVIVGDGACGKTCLLIVFSKDQFPEVYVPTVFENYVADIEVDGKQVELALWDTAGQEDYDRLRPLSYPDTDVILMCFSIDSPDSLENIPEKWTPEVKHFCPNVPIILVGNKKDLRNDEHTRRELAKMKQEPVKPEEGRDMANRIGAFGYMECSAKTKDGVREVFEMATRAALQARRGKKKSGCLVL

SEQ ID NO: 2 - protein, 193 aa, Homo sapiens; identical to SEQ ID NO: 1

SEQ ID NO: 3 - protein, 279 aa, Homo sapiens
MATIGVTRGLGDHSLKVCSSTLPIKPFLSCFPEVRVYDLTQYEHCPDDVLVLGTDGLWDVTTDCEVAATVDRVLSAYEPNDHSSPTMAAIRKKLVIVGDGACGKTCLLIVFSKDQFPEVYVPTVFENYIADIEVDGKQVELALWDTAGQEDYDRLRPLSYPDTDVILMCFSIDSPDSLENIPEKWTPEVKHFCPNVPIILVGNKKDLRQDEHTRRELAKMKQEPVRSEEGRDMANRISAFGYLECSAKTKEGVREVFEMATRAGLQVRKNKRRRGCPIL

SEQ ID NO: 4 - protein, 193 aa, Homo sapiens; identical to SEQ ID NO: 1

SEQ ID NO: 5 - protein, 193 aa, Homo sapiens; identical to SEQ ID NO: 1

SEQ ID NO: 6 - protein, 193 aa, Homo sapiens
MAAIRKKLVIVGDGACGKTCLLIVFSKDQFPEVYVPTVFENYIADIEVDGKQVELALWDTAGQEDYDRLRPLSYPDTDVILMCFSIDSPDSLENIPEKWTPEVKHFCPNVPIILVGNKKDLRQDEHTRRELAKMKQEPVRSEEGRDMANRISAFGYLECSAKTKEGVREVFEMATRAGLQVRKNKRRRGCPIL

SEQ ID NO: 7 - protein, 230 aa, Homo sapiens
MVSISGGDLPTGLDFISAPEPALSSCSLGTSAGWSPTMAAIRKKLVIVGDGACGKTCLLIVFSKDQFPEVYVPTVFENYIADIEVDGKQVELALWDTAGQEDYDRLRPLSYPDTDVILMCFSIDSPDSLENIPEKWTPEVKHFCPNVPIILVGNKKDLRQDEHTRRELAKMKQEPVRSEEGRDMANRISAFGYLECSAKTKEGVREVFEMATRAGLQVRKNKRRRGCPIL

SEQ ID NO: 8 - protein, 384 aa, Homo sapiens
MEPPGRRECPFPSWRFPGLLLAAMVLLLYSFSDACEEPPTFEAMELIGKPKPYYEIGERVDYKCKKGYFYIPPLATHTICDRNHTWLPVSDDACYRETCPYIRDPLNGQAVPANGTYEFGYQMHFICNEGYYLIGEEILYCELKGSVAIWSGKPPICEKVLCTPPPKIKNGKHTFSEVEVFEYLDAVTYSCDPAPGPDPFSLIGESTIYCGDNSVWSRAAPECKVVKCRFPVVENGKQISGFGKKFYYKATVMFECDKGFYLDGSDTIVCDSNSTWDPPVPKCLKVSTSSTTKSPASSASGPRPTYKPPVSNYPGYPKPEEGILDSLDVWVIAVIVIAIVVGVAVICVVPYRYLQRRKKKGKADGGAEYATYQTKSTTPAEQRG

SEQ ID NO: 9 - protein, 392 aa, Homo sapiens [sequence omitted]

SEQ ID NO: 10 - protein, 399 aa, Homo sapiens
MEPPGRRECPFPSWRFPGLLLAAMVLLLYSFSDACEEPPTFEAMELIGKPKPYYEIGERVDYKCKKGYFYIPPLATHTICDRNHTWLPVSDDACYRETCPYIRDPLNGQAVPANGTYEFGYQMHFICNEGYYLIGEEILYCELKGSVAIWSGKPPICEKVLCTPPPKIKNGKHTFSEVEVFEYLDAVTYSCDPAPGPDPFSLIGESTIYCGDNSVWSRAAPECKVVKCRFPVVENGKQISGFGKKFYYKATVMFECDKGFYLDGSDTIVCDSNSTWDPPVPKCLKVLPPSSTKPPALSHSVSTSSTTKSPASSASGPRPTYKPPVSNYPGYPKPEEGILDSLDVWVIAVIVIAIVVGVAVICVVPYRYLQRRKKKGKADGGAEYATYQTKSTTPAEQRG

SEQ ID NO: 11 - protein, 362 aa, Homo sapiens
MEPPGRRECPFPSWRFPGLLLAAMVLLLYSFSDACEEPPTFEAMELIGKPKPYYEIGERVDYKCKKGYFYIPPLATHTICDRNHTWLPVSDDACYRETCPYIRDPLNGQAVPANGTYEFGYQMHFICNEGYYLIGEEILYCELKGSVAIWSGKPPICEKVLCTPPPKIKNGKHTFSEVEVFEYLDAVTYSCDPAPGPDPFSLIGESTIYCGDNSVWSRAAPECKVVKCRFPVVENGKQISGFGKKFYYKATVMFECDKGFYLDGSDTIVCDSNSTWDPPVPKCLKGPRPTYKPPVSNYPGYPKPEEGILDSLDVWVIAVIVIAIVVGVAVICVVPYRYLQRRKKKGTYLTDETHREVKFTSL

SEQ ID NO: 12 - protein, 369 aa, Homo sapiens
MEPPGRRECPFPSWRFPGLLLAAMVLLLYSFSDACEEPPTFEAMELIGKPKPYYEIGERVDYKCKKGYFYIPPLATHTICDRNHTWLPVSDDACYRETCPYIRDPLNGQAVPANGTYEFGYQMHFICNEGYYLIGEEILYCELKGSVAIWSGKPPICEKVLCTPPPKIKNGKHTFSEVEVFEYLDAVTYSCDPAPGPDPFSLIGESTIYCGDNSVWSRAAPECKVVKCRFPVVENGKQISGFGKKFYYKATVMFECDKGFYLDGSDTIVCDSNSTWDPPVPKCLKGPRPTYKPPVSNYPGYPKPEEGILDSLDVWVIAVIVIAIVVGVAVICVVPYRYLQRRKKKGKADGGAEYATYQTKSTTPAEQRG

SEQ ID NO: 13 - protein, 377 aa, Homo sapiens
MEPPGRRECPFPSWRFPGLLLAAMVLLLYSFSDACEEPPTFEAMELIGKPKPYYEIGERVDYKCKKGYFYIPPLATHTICDRNHTWLPVSDDACYRETCPYIRDPLNGQAVPANGTYEFGYQMHFICNEGYYLIGEEILYCELKGSVAIWSGKPPICEKVLCTPPPKIKNGKHTFSEVEVFEYLDAVTYSCDPAPGPDPFSLIGESTIYCGDNSVWSRAAPECKVVKCRFPVVENGKQISGFGKKFYYKATVMFECDKGFYLDGSDTIVCDSNSTWDPPVPKCLKVSTSSTTKSPASSASGPRPTYKPPVSNYPGYPKPEEGILDSLDVWVIAVIVIAIVVGVAVICVVPYRYLQRRKKKGTYLTDETHREVKFTSL

SEQ ID NO: 14 - protein, 370 aa, Homo sapiens
MEPPGRRECPFPSWRFPGLLLAAMVLLLYSFSDACEEPPTFEAMELIGKPKPYYEIGERVDYKCKKGYFYIPPLATHTICDRNHTWLPVSDDACYRETCPYIRDPLNGQAVPANGTYEFGYQMHFICNEGYYLIGEEILYCELKGSVAIWSGKPPICEKVLCTPPPKIKNGKHTFSEVEVFEYLDAVTYSCDPAPGPDPFSLIGESTIYCGDNSVWSRAAPECKVVKCRFPVVENGKQISGFGKKFYYKATVMFECDKGFYLDGSDTIVCDSNSTWDPPVPKCLKVSTSSTTKSPASSASGYPKPEEGILDSLDVWVIAVIVIAIVVGVAVICVVPYRYLQRRKKKGKADGGAEYATYQTKSTTPAEQRG

SEQ ID NO: 15 - protein, 373 aa, Homo sapiens
MEPPGRRECPFPSWRFPGLLLAAMVLLLYSFSDACEEPPTFEAMELIGKPKPYYEIGERVDYKCKKGYFYIPPLATHTICDRNHTWLPVSDDACYRETCPYIRDPLNGQAVPANGTYEFGYQMHFICNEGYYLIGEEILYCELKGSVAIWSGKPPICEKVLCTPPPKIKNGKHTFSEVEVFEYLDAVTYSCDPAPGPDPFSLIGESTIYCGDNSVWSRAAPECKVVKCRFPVVENGKQISGFGKKFYYKATVMFECDKGFYLDGSDTIVCDSNSTWDPPVPKCLKVSTSSTTKSPASSASGPRPTYKPPVSNYPGYPKPEEGILDSLDVWVIAVIVIAIDIFKGGRRKGKQMVELNMPLTRLNQPLQQSREAE

SEQ ID NO: 16 - protein, 349 aa, Homo sapiens
MEPPGRRECPFPSWRFPGLLLAAMVLLLYSFSDACEEPPTFEAMELIGKPKPYYEIGERVDYKCKKGYFYIPPLATHTICDRNHTWLPVSDDACYRETCPYIRDPLNGQAVPANGTYEFGYQMHFICNEGYYLIGEEILYCELKGSVAIWSGKPPICEKVLCTPPPKIKNGKHTFSEVEVFEYLDAVTYSCDPAPGPDPFSLIGESTIYCGDNSVWSRAAPECKVVKCRFPVVENGKQISGFGKKFYYKATVMFECDKGFYLDGSDTIVCDSNSTWDPPVPKCLKGPRPTYKPPVSNYPGYPKPEEGILDSLDVWVIAVIVIAIGKQMVELNMPLTRLNQPLQQSREAE

SEQ ID NO: 17 - protein, 377 aa, Homo sapiens; identical to SEQ ID NO: 13

SEQ ID NO: 18 - protein, 378 aa, Homo sapiens
MEPPGRRECPFPSWRFPGLLLAAMVLLLYSFSDACEEPPTFEAMELIGKPKPYYEIGERVDYKCKKGYFYIPPLATHTICDRNHTWLPVSDDACYRETCPYIRDPLNGQAVPANGTYEFGYQMHFICNEGYYLIGEEILYCELKGSVAIWSGKPPICEKVLCTPPPKIKNGKHTFSEVEVFEYLDAVTYSCDPAPGPDPFSLIGESTIYCGDNSVWSRAAPECKVVKCRFPVVENGKQISGFGKKFYYKATVMFECDKGFYLDGSDTIVCDSNSTWDPPVPKCLKVLPPSSTKPPALSHSVSTSSTTKSPASSASGYPKPEEGILDSLDVWVIAVIVIAIVVGVAVICVVPYRYLQRRKKKGTYLTDETHREVKFTSL

SEQ ID NO: 19 - protein, 385 aa, Homo sapiens
MEPPGRRECPFPSWRFPGLLLAAMVLLLYSFSDACEEPPTFEAMELIGKPKPYYEIGERVDYKCKKGYFYIPPLATHTICDRNHTWLPVSDDACYRETCPYIRDPLNGQAVPANGTYEFGYQMHFICNEGYYLIGEEILYCELKGSVAIWSGKPPICEKVLCTPPPKIKNGKHTFSEVEVFEYLDAVTYSCDPAPGPDPFSLIGESTIYCGDNSVWSRAAPECKVVKCRFPVVENGKQISGFGKKFYYKATVMFECDKGFYLDGSDTIVCDSNSTWDPPVPKCLKVLPPSSTKPPALSHSVSTSSTTKSPASSASGYPKPEEGILDSLDVWVIAVIVIAIVVGVAVICVVPYRYLQRRKKKGKADGGAEYATYQTKSTTPAEQRG

SEQ ID NO: 20 - protein, 363 aa, Homo sapiens
MEPPGRRECPFPSWRFPGLLLAAMVLLLYSFSDACEEPPTFEAMELIGKPKPYYEIGERVDYKCKKGYFYIPPLATHTICDRNHTWLPVSDDACYRETCPYIRDPLNGQAVPANGTYEFGYQMHFICNEGYYLIGEEILYCELKGSVAIWSGKPPICEKVLCTPPPKIKNGKHTFSEVEVFEYLDAVTYSCDPAPGPDPFSLIGESTIYCGDNSVWSRAAPECKVVKCRFPVVENGKQISGFGKKFYYKATVMFECDKGFYLDGSDTIVCDSNSTWDPPVPKCLKVSTSSTTKSPASSASGYPKPEEGILDSLDVWVIAVIVIAIVVGVAVICVVPYRYLQRRKKKGTYLTDETHREVKFTSL

SEQ ID NO: 21 - protein, 355 aa, Homo sapiens
MEPPGRRECPFPSWRFPGLLLAAMVLLLYSFSDACEEPPTFEAMELIGKPKPYYEIGERVDYKCKKGYFYIPPLATHTICDRNHTWLPVSDDACYRETCPYIRDPLNGQAVPANGTYEFGYQMHFICNEGYYLIGEEILYCELKGSVAIWSGKPPICEKVLCTPPPKIKNGKHTFSEVEVFEYLDAVTYSCDPAPGPDPFSLIGESTIYCGDNSVWSRAAPECKVVKCRFPVVENGKQISGFGKKFYYKATVMFECDKGFYLDGSDTIVCDSNSTWDPPVPKCLKGYPKPEEGILDSLDVWVIAVIVIAIVVGVAVICVVPYRYLQRRKKKGKADGGAEYATYQTKSTTPAEQRG

SEQ ID NO: 22 - protein, 348 aa, Homo sapiens
MEPPGRRECPFPSWRFPGLLLAAMVLLLYSFSDACEEPPTFEAMELIGKPKPYYEIGERVDYKCKKGYFYIPPLATHTICDRNHTWLPVSDDACYRETCPYIRDPLNGQAVPANGTYEFGYQMHFICNEGYYLIGEEILYCELKGSVAIWSGKPPICEKVLCTPPPKIKNGKHTFSEVEVFEYLDAVTYSCDPAPGPDPFSLIGESTIYCGDNSVWSRAAPECKVVKCRFPVVENGKQISGFGKKFYYKATVMFECDKGFYLDGSDTIVCDSNSTWDPPVPKCLKGYPKPEEGILDSLDVWVIAVIVIAIVVGVAVICVVPYRYLQRRKKKGTYLTDETHREVKFTSL

SEQ ID NO: 23 - protein, 478 aa, Homo sapiens
MAPLRPLLILALLAWVALADQESCKGRCTEGFNVDKKCQCDELCSYYQSCCTDYTAECKPQVTRGDVFTMPEDEYTVYDDGEEKNNATVHEQVGGPSLTSDLQAQSKGNPEQTPVLKPEEEAPAPEVGASKPEGIDSRPETLHPGRPQPPAEEELCSGKPFDAFTDLKNGSLFAFRGQYCYELDEKAVRPGYPKLIRDVWGIEGPIDAAFTRINCQGKTYLFKGSQYWRFEDGVLDPDYPRNISDGFDGIPDNVDAALALPAHSYSGRERVYFFKGKQYWEYQFQHQPSQEECEGSSLSAVFEHFAMMQRDSWEDIFELLFWGRTSAGTRQPQFISRDWHGVPGQVDAAMAGRIYISGMAPRPSLAKKQRFRHRNRKGYRSQRGHSRGRNQNSRRPSRATWLSLFSSEESNLGANNYDDYRMDWLVPATCEPIQSVFFFSGDKYYRVNLRTRRVDTVDPPYPRSIAQYWLGCPAPGHL

SEQ ID NO: 24 - protein, 478 aa, Homo sapiens
MAPLRPLLILALLAWVALADQESCKGRCTEGFNVDKKCQCDELCSYYQSCCTDYTAECKPQVTRGDVFTMPEDEYTVYDDGEEKNNATVHEQVGGPSLTSDLQAQSKGNPEQTPVLKPEEEAPAPEVGASKPEGIDSRPETLHPGRPQPPAEEELCSGKPFDAFTDLKNGSLFAFRGQYCYELDEKAVRPGYPKLIRDVWGIEGPIDAAFTRINCQGKTYLFKGSQYWRFEDGVLDPDYPRNISDGFDGIPDNVDAALALPAHSYSGRERVYFFKGKQYWEYQFQHQPSQEECEGSSLSAVFEHFAMMQRDSWEDIFELLFWGRTSAGTRQPQFISRDWHGVPGQVDAAMAGRIYISGMAPRPSLAKKQRFRHRNRKGYRSQRGHSRGRNQNSRRPSRAMWLSLFSSEESNLGANNYDDYRMDWLVPATCEPIQSVFFFSGDKYYRVNLRTRRVDTVDPPYPRSIAQYWLGCPAPGHL

SEQ ID NO: 25 - protein, 33 aa, Homo sapiens
MLLLILLRDESHFTKIKLCFSAKMMIQVEDTSL

SEQ ID NO: 26 - protein, 1181 aa, Homo sapiens
MGPERTGAAPLPLLLVLALSQGILNCCLAYNVGLPEAKIFSGPSSEQFGYAVQQFINPKGNWLLVGSPWSGFPENRMGDVYKCPVDLSTATCEKLNLQTSTSIPNVTEMKTNMSLGLILTRNMGTGGFLTCGPLWAQQCGNQYYTTGVCSDISPDFQLSASFSPATQPCPSLIDVVVVCDESNSIYPWDAVKNFLEKFVQGLDIGPTKTQVGLIQYANNPRVVFNLNTYKTKEEMIVATSQTSQYGGDLTNTFGAIQYARKYAYSAASGGRRSATKVMVVVTDGESHDGSMLKAVIDQCNHDNILRFGIAVLGYLNRNALDTKNLIKEIKAIASIPTERYFFNVSDEAALLEKAGTLGEQIFSIEGTVQGGDNFQMEMSQVGFSADYSSQNDILMLGAVGAFGWSGTIVQKTSHGHLIFPKQAFDQILQDRNHSSYLGYSVAAISTGESTHFVAGAPRANYTGQIVLYSVNENGNITVIQAHRGDQIGSYFGSVLCSVDVDKDTITDVLLVGAPMYMSDLKKEEGRVYLFTIKKGILGQHQFLEGPEGIENTRFGSAIAALSDINMDGFNDVIVGSPLENQNSGAVYIYNGHQGTIRTKYSQKILGSDGAFRSHLQYFGRSLDGYGDLNGDSITDVSIGAFGQVVQLWSQSIADVAIEASFTPEKITLVNKNAQIILKLCFSAKFRPTKQNNQVAIVYNITLDADGFSSRVTSRGLFKENNERCLQKNMVVNQAQSCPEHIIYIQEPSDVVNSLDLRVDISLENPGTSPALEAYSETAKVFSIPFHKDCGEDGLCISDLVLDVRQIPAAQEQPFIVSNQNKRLTFSVTLKNKRESAYNTGIVVDFSENLFFASFSLPVDGTEVTCQVAASQKSVACDVGYPALKREQQVTFTINFDFNLQNLQNQASLSFQALSESQEENKADNLVNLKIPLLYDAEIHLTRSTNINFYEISSDGNVPSIVHSFEDVGPKFIFSLKVTTGSVPVSMATVIIHIPQYTKEKNPLMYLTGVQTDKAGDISCNADINPLKIGQTSSSVSFKSENFRHTKELNCRTASCSNVTCWLKDVHMKGEYFVNVTTRIWNGTFASSTFQTVQLTAAAEINTYNPEIYVIEDNTVTIPLMIMKPDEKAEVPTGVIIGSIIAGILLLLALVAILWKLGFFKRKYEKMTKNPDEIDETTELSS

SEQ ID NO: 27 - protein, 1181 aa, Homo sapiens
MGPERTGAAPLPLLLVLALSQGILNCCLAYNVGLPEAKIFSGPSSEQFGYAVQQFINPKGNWLLVGSPWSGFPENRMGDVYKCPVDLSTATCEKLNLQTSTSIPNVTEMKTNMSLGLILTRNMGTGGFLTCGPLWAQQCGNQYYTTGVCSDISPDFQLSASFSPATQPCPSLIDVVVVCDESNSIYPWDAVKNFLEKFVQGLDIGPTKTQVGLIQYANNPRVVFNLNTYKTKEEMIVATSQTSQYGGDLTNTFGAIQYARKYAYSAASGGRRSATKVMVVVTDGESHDGSMLKAVIDQCNHDNILRFGIAVLGYLNRNALDTKNLIKEIKAIASIPTERYFFNVSDEAALLEKAGTLGEQIFSIEGTVQGGDNFQMEMSQVGFSADYSSQNDILMLGAVGAFGWSGTIVQKTSHGHLIFPKQAFDQILQDRNHSSYLGYSVAAISTGESTHFVAGAPRANYTGQIVLYSVNENGNITVIQAHRGDQIGSYFGSVLCSVDVDKDTITDVLLVGAPMYMSDLKKEEGRVYLFTIKEGILGQHQFLEGPEGIENTRFGSAIAALSDINMDGFNDVIVGSPLENQNSGAVYIYNGHQGTIRTKYSQKILGSDGAFRSHLQYFGRSLDGYGDLNGDSITDVSIGAFGQVVQLWSQSIADVAIEASFTPEKITLVNKNAQIILKLCFSAKFRPTKQNNQVAIVYNITLDADGFSSRVTSRGLFKENNERCLQKNMVVNQAQSCPEHIIYIQEPSDVVNSLDLRVDISLENPGTSPALEAYSETAKVFSIPFHKDCGEDGLCISDLVLDVRQIPAAQEQPFIVSNQNKRLTFSVTLKNKRESAYNTGIVVDFSENLFFASFSLPVDGTEVTCQVAASQKSVACDVGYPALKREQQVTFTINFDFNLQNLQNQASLSFQALSESQEENKADNLVNLKIPLLYDAEIHLTRSTNINFYEISSDGNVPSIVHSFEDVGPKFIFSLKVTTGSVPVSMATVIIHIPQYTKEKNPLMYLTGVQTDKAGDISCNADINPLKIGQTSSSVSFKSENFRHTKELNCRTASCSNVTCWLKDVHMKGEYFVNVTTRIWNGTFASSTFQTVQLTAAAEINTYNPEIYVIEDNTVTIPLMIMKPDEKAEVPTGVIIGSIIAGILLLLALVAILWKLGFFKRKYEKMTKNPDEIDETTELSS

SEQ ID NO: 28 - protein, 33 aa, Homo sapiens; identical to SEQ ID NO: 25

SEQ ID NO: 29 - protein, 33 aa, Homo sapiens; identical to SEQ ID NO: 25

SEQ ID NO: 30 - protein, 33 aa, Homo sapiens; identical to SEQ ID NO: 25

SEQ ID NO: 31 - protein, 33 aa, Homo sapiens; identical to SEQ ID NO: 25

SEQ ID NO: 32 - protein, 33 aa, Homo sapiens; identical to SEQ ID NO: 25

SEQ ID NO: 33 - protein, 33 aa, Homo sapiens; identical to SEQ ID NO: 25

SEQ ID NO: 34 - protein, 33 aa, Homo sapiens; identical to SEQ ID NO: 25

SEQ ID NO: 35 - protein, 1179 aa, Homo sapiens
MGPERTGAAPLPLLLVLALSQGILNCCLAYNVGLPEAKIFSGPSSEQFGYAVQQFINPKGNWLLVGSPWSGFPENRMGDVYKCPVDLSTATCEKLNLQTSTSIPNVTEMKTNMSLGLILTRNMGTGGFLTCGPLWAQQCGNQYYTTGVCSDISPDFQLSASFSPATQPCPSLIDVVVVCDESNSIYPWDAVKNFLEKFVQGLDIGPTKTQVGLIQYANNPRVVFNLNTYKTKEEMIVATSQTSQYGGDLTNTFGAIQYARKYAYSAASGGRRSATKVMVVVTDGESHDGSMLKAVIDQCNHDNILRFGIAVLGYLNRNALDTKNLIKEIKAIASIPTERYFFNVSDEAALLEKAGTLGEQIFSIEGTVQGGDNFQMEMSQVGFSADYSSQNDILMLGAVGAFGWSGTIVQKTSHGHLIFPKQAFDQILQDRNHSSYLGYSVAAISTGESTHFVAGAPRANYTGQIVLYSVNENGNITVIQAHRGDQIGSYFGSVLCSVDVDKDTITDVLLVGAPMYMSDLKKEEGRVYLFTIKEGILGQHQFLEGPEGIENTRFGSAIAALSDINMDGFNDVIVGSPLENQNSGAVYIYNGHQGTIRTKYSQKILGSDGAFRSHLQYFGRSLDGYGDLNGDSITDVSIGAFGQVVQLWSQSIADVAIEASFTPEKITLVNKNAQIILKLCFSAKFRPTKQNNQVAIVYNITLDADGFSSRVTSRGLFKENNERCLQKNMVVNQAQSCPEHIIYIQEPSDVVNSLDLRVDISLENPGTSPALEAYSETAKVFSIPFHKDCGEDGLCISDLVLDVRQIPAAQEQPFIVSNQNKRLTFSVTLKNKRESAYNTGIVVDFSENLFFASFSLPVDGTEVTCQVAASQKSVACDVGYPALKREQQVTFTINFDFNLQNLQNQASLSFQALSESQEENKADNLVNLKIPLLYDAEIHLTRSTNINFYEISSDGNVPSIVHSFEDVGPKFIFSLKVGSVPVSMATVIIHIPQYTKEKNPLMYLTGVQTDKAGDISCNADINPLKIGQTSSSVSFKSENFRHTKELNCRTASCSNVTCWLKDVHMKGEYFVNVTTRIWNGTFASSTFQTVQLTAAAEINTYNPEIYVIEDNTVTIPLMIMKPDEKAEVPTGVIIGSIIAGILLLLALVAILWKLGFFKRKYEKMTKNPDEIDETTELSS

SEQ ID NO: 36 - protein, 33 aa, Homo sapiens; identical to SEQ ID NO: 25

SEQ ID NO: 37 - protein, 33 aa, Homo sapiens; identical to SEQ ID NO: 25

SEQ ID NO: 38 - protein, 1179 aa, Homo sapiens
MAACGRVRRMFRLSAALHLLLLFAAGAEKLPGQGVHSQGQGPGANFVSFVGQAGGGGPAGQQLPQLPQSSQLQQQQQQQQQQQQPQPPQPPFPAGGPPARRGGAGAGGGWKLAEEESCREDVTRVCPKHTWSNNLAVLECLQDVREPENEISSDCNHLLWNYKLNLTTDPKFESVAREVCKSTITEIKECADEPVGKGYMVSCLVDHRGNITEYQCHQYITKMTAIIFSDYRLICGFMDDCKNDINILKCGSIRLGEKDAHSQGEVVSCLEKGLVKEAEEREPKIQVSELCKKAILRVAELSSDDFHLDRHLYFACRDDRERFCENTQAGEGRVYKCLFNHKFEESMSEKCREALTTRQKLIAQDYKVSYSLAKSCKSDLKKYRCNVENLPRSREARLSYLLMCLESAVHRGRQVSSECQGEMLDYRRMLMEDFSLSPEIILSCRGEIEHHCSGLHRKGRTLHCLMKVVRGEKGNLGMNCQQALQTLIQETDPGADYRIDRALNEACESVIQTACKHIRSGDPMILSCLMEHLYTEKMVEDCEHRLLELQYFISRDWKLDPVLYRKCQGDASRLCHTHGWNETSEFMPQGAVFSCLYRHAYRTEEQGRRLSRECRAEVQRILHQRAMDVKLDPALQDKCLIDLGKWCSEKTETGQELECLQDHLDDLVVECRDIVGNLTELESEDIQIEALLMRACEPIIQNFCHDVADNQIDSGDLMECLIQNKHQKDMNEKCAIGVTHFQLVQMKDFRFSYKFKMACKEDVLKLCPNIKKKVDVVICLSTTVRNDTLQEAKEHRVSLKCRRQLRVEELEMTEDIRLEPDLYEACKSDIKNFCSAVQYGNAQIIECLKENKKQLSTRCHQKVFKLQETEMMDPELDYTLMRVCKQMIKRFCPEADSKTMLQCLKQNKNSELMDPKCKQMITKRQITQNTDYRLNPMLRKACKADIPKFCHGILTKAKDDSELEGQVISCLKLRYADQRLSSDCEDQIRIIIQESALDYRLDPQLQLHCSDEISSLCAEEAAAQEQTGQVEECLKVNLLKIKTELCKKEVLNMLKESKADIFVDPVLHTACALDIKHHCAAITPGRGRQMSCLMEALEDKRVRLQPECKKRLNDRIEMWSYAAKVAPADGFSDLAMQVMTSPSKNYILSVISGSICILFLIGLMCGRITKRVTRELKDR

SEQ ID NO: 39 - protein, 1179 aa, Homo sapiens
MAACGRVRRMFRLSAALHLLLLFAAGAEKLPGHGVHSQGQGPGANFVSFVGQAGGGGPAGQQLPQLLQSSQLQQQQQQQQQQQQLQPPQPPFPAGGPPARRGGAGAGGGWKLAEEESCREDVTRVCPKHTWSNNLAVLECLQDVREPENEISSDCNHLLWNYKLNLTTDPKFESVAREVCKSTITEIKECADEPVGKGYMVSCLVDHRGNITEYQCHQYITKMTAIIFSDYRLICGFMDDCKNDINILKCGSIRLGEKDAHSQGEVVSCLEKGLVKEAEEREPKIQVSELCKKAILRVAELSSDDFHLDRHLYFACRDDRERFCENTQAGEGRVYKCLFNHKFEESMSEKCREALTTRQKLIAQDYKVSYSLAKSCKSDLKKYRCNVENLPRSREARLSYLLMCLESAVHRGRQVSSECQGEMLDYRRMLMEDFSLSPEIILSCRGEIEHHCSGLHRKGRTLHCLMKVVRGEKGNLGMNCQQALQTLIQETDPGADYRIDRALNEACESVIQTACKHIRSGDPMILSCLMEHLYTEKMVEDCEHRLLELQYFISRDWKLDPVLYRKCQGDASRLCHTHGWNETSEFMPQGAVFSCLYRHAYRTEEQGRRLSRECRAEVQRILHQRAMDVKLDPALQDKCLIDLGKWCSEKTETGQELECLQDHLDDLVVECRDIVGNLTELESEDIQIEALLMRACEPIIQNFCHDVADNQIDSGDLMECLIQNKHQKDMNEKCAIGVTHFQLVQMKDFRFSYKFKMACKEDVLKLCPNIKKKVDVVICLSTTVRNDTLQEAKEHRVSLKCRRQLRVEELEMTEDIRLEPDLYEACKSDIKNFCSAVQYGNAQIIECLKENKKQLSTRCHQKVFKLQETEMMDPELDYTLMRVCKQMIKRFCPEADSKTMLQCLKQNKNSELMDPKCKQMITKRQITQNTDYRLNPMLRKACKADIPKFCHGILTKAKDDSELEGQVISCLKLRYADQRLSSDCEDQIRIIIQESALDYRLDPQLQLHCSDEISSLCAEEAAAQEQTGQVEECLKVNLLKIKTELCKKEVLNMLKESKADIFVDPVLHTACALDIKHHCAAITPGRGRQMSCLMEALEDKRVRLQPECKKRLNDRIEMWSYAAKVAPADGFSDLAMQVMTSPSKNYILSVISGSICILFLIGLMCGRITKRVTRELKDR

SEQ ID NO: 40 - protein, 1177 aa, Homo sapiens
MAACGRVRRMFRLSAALHLLLLFAAGGRNSPARASHSQGQGPGANFVSFVGQAGGGGPAGQQLPQLPQSSQLQQQQQQQQQQQQPQPPQPPFPAGGPPRRGGAGAGGGWKLAEEESCREDVTRVCPKHTWSNNLAVLECLQDVREPENEISSDCNHLLWNYKLNLTTDPKFESVAREVCKSTITEIKECADEPVGKGYMVSCLVDHRGNITEYQCHQYITKMTAIIFSDYRLICGFMDDCKNDINILKCGSIRLGEKDAHSQGEVVSCLEKGLVKEAEEREPKIQVSELCKKAILRVAELSSDDFHLDRHLYFACRDDRERFCENTQAGEGRVYKCLFNHKFEESMSEKCREALTTRQKLIAQDYKVSYSLAKSCKSDLKKYRCNVENLPRSREARLSYLLMCLESAVHRGRQVSSECQGEMLDYRRMLMEDFSLSPEIILSCRGEIEHHCSGLHRKGRTLHCLMKVVRGEKGNLGMNCQQALQTLIQETDPGADYRIDRALNEACESVIQTACKHIRSGDPMISSCLMEHLYTEKMVEDCEHRLLELQYFISRDWKLDPVLYRKCQGDASRLCHTHGWNETSEFMPQGAVFSCLYRHAYRTEEQGRRLSRECRAEVQRILHQRAMDVKLDPALQDKCLIDLGKWCSEKTETGQELECLQDHLDDLVVECRDIVGNLTELESEDIQIEALLMRACEPIIQTFCHDADNQIDSGDLMECLIQNKHQKDMNEKCAIGVTHFQLVQMKDFRFSYKFKMACKEDVLKLCPNIKKKVDVVICLSTTVRNDTLQEAKEHRVSLKCRRQLRVEELEMTEDIRLEPDLYEACKSDIKNFCSAVQYGNAQIIECLKENKKQLSTRCHQKVFKLQETEMMDPELDYTLMRVCKQMIKRFCPEADSKTMLQCLKQNKNSELMDPKCKQMITKRQITQNTDYRLNPMLRKACKADIPKFCHGILTKAKDDSELEGQVISCLKLRYADQRLSSDCEDQIRIIIQESALDYRLDPQLQLHCSDEISSLCAEEAAAQEQTGQVEECLKVNLLKIKTELCKKEVLNMLKESKADIFVDPVLHTACALDIKHHCAALTPGRGRQMSCLMEALEDKRVRLQPECKKRLNDRIEMWSYAAKVAPADGFSDLAMQVMTSPSKNYILSVISGSICILFLIGLMCGRITKRVTRELKDR

SEQ ID NO: 41 - protein, 1179 aa, Homo sapiens; identical to SEQ ID NO: 38

SEQ ID NO: 42 - protein, 411 aa, Homo sapiens
MWSGWWLWPLVAVCTADFFRDEAERIMRDSPVIDGHNDLPWQLLDMFNNRLQDERANLTTLAGTHTNIPKLRAGFVGGQFWSVYTPCDTQNKDAVRRTLEQMDVVHRMCRMYPETFLYVTSSAGIRQAFREGKVASLIGVEGGHSIDSSLGVLRALYQLGMRYLTLTHSCNTPWADNWLVDTGDSEPQSQGLSPFGQRVVKELNRLGVLIDLAHVSVATMKATLQLSRAPVIFSHSSAYSVCASRRNVPDDVLRLVKQTDSLVMVNFYNNYISCTNKANLSQVADHLDHIKEVAGARAVGFGGDFDGVPRVPEGLEDVSKYPDLIAELLRRNWTEAEVKGALADNLLRVFEAVEQASNLTQAPEEEPIPLDQLGGSCRTHYGYSSGASSLHRHWGLLLASLAPLVLCLSLL

SEQ ID NO: 43 - protein, 411 aa, Homo sapiens [sequence omitted]

SEQ ID NO: 44 - protein, 411 aa, Homo sapiens; identical to SEQ ID NO: 42

SEQ ID NO: 45 - protein, 152 aa, Homo sapiens
MAGLPRRIIKETQRLLAEPVPGIKAEPDESNARYFHVVIAGPQDSPFEGGTFKLELFLPEEYPMAAPKVRFMTKIYHPNVDKLGRICLDILKDKWSPALQIRTVLLSIQALLSAPNPDDPLANDVAEQWKTNEAQAIETARAWTRLYAMNNI

SEQ ID NO: 46 - protein, 152 aa, Homo sapiens; identical to SEQ ID NO: 45

SEQ ID NO: 47 - protein, 152 aa, Homo sapiens; identical to SEQ ID NO: 45

SEQ ID NO: 48 - protein, 152 aa, Homo sapiens; identical to SEQ ID NO: 45

SEQ ID NO: 49 - protein, 420 aa, Homo sapiens
MSSQVVGIEPLYIKAEPASPDSPKGSSETETEPPVALAPGPAPTRCLPGHKEEEDGEGAGPGEQGGGKLVLSSLPKRLCLVCGDVASGYHYGVASCEACKAFFKRTIQGSIEYSCPASNECEITKRRRKACQACRFTKCLRVGMLKEVQTRRGSRKLCSAGGRSRLRSGGGPGPPSAGCRRCAASGAPPAAVAPARRRSGSGRGAGMGLAGVCALRRSAGYILVGGAGGQSAAAAARRCSEGEWASGGVRSFSRAAAAMAPIKVGDAIPAVEVFEGEPGNKVNLAELFKGKKGVLFGVPGAFTPGCSKTHLPGFVEQAEALKAKGVQVVACLSVNDAFVTGEWGRAHKAEGKVRLLADPTGAFGKETDLLLDDSLVSIFGNRRLKRFSMVVQDGIVKALNVEPDGTGLTCSLAPNIISQL

SEQ ID NO: 50 - protein, 214 aa, Homo sapiens
MGLAGVCALRRSAGYILVGGAGGQSAAAAARRCSEGEWASGGVRSFSRAAAAMAPIKVGDAIPAVEVFEGEPGNKVNLAELFKGKKGVLFGVPGAFTPGCSKTHLPGFVEQAEALKAKGVQVVACLSVNDAFVTGEWGRAHKAEGKVRLLADPTGAFGKETDLLLDDSLVSIFGNRRLKRFSMVVQDGIVKALNVEPDGTGLTCSLAPNIISQL

SEQ ID NO: 51 - protein, 214 aa, Homo sapiens; identical to SEQ ID NO: 50

SEQ ID NO: 52 - protein, 170 aa, Homo sapiens
MGLAGVCALRRSAGYILVGGAGGQSAAAAARRCSEGEWASGGVRSFSRAAAAMAPIKVGDAIPAVEVFEGEPGNKVNLAELFKGKKGVLFGVPGAFTPGCSKVRLLADPTGAFGKETDLLLDDSLVSIFGNRRLKRFSMVVQDGIVKALNVEPDGTGLTCSLAPNIISQL

SEQ ID NO: 53 - protein, 214 aa, Homo sapiens; identical to SEQ ID NO: 50

SEQ ID NO: 54 - protein, 2639 aa, Homo sapiens
MSSSHSRAGQSAAGAAPGGGVDTRDAEMPATEKDLAEDAPWKKIQQNTFTRWCNEHLKCVSKRIANLQTDLSDGLRLIALLEVLSQKKMHRKHNQRPTFRQMQLENVSVALEFLDRESIKLVSIDSKAIVDGNLKLILGLIWTLILHYSISMPMWDEEEDEEAKKQTPKQRLLGWIQNKLPQLPITNFSRDWQSGRALGALVDSCAPGLCPDWDSWDASKPVTNAREAMQQADDWLGIPQVITPEEIVDPNVDEHSVMTYLSQFPKAKLKPGAPLRPKLNPKKARAYGPGIEPTGNMVKKRAEFTVETRSAGQGEVLVYVEDPAGHQEEAKVTANNDKNRTFSVWYVPEVTGTHKVTVLFAGQHIAKSPFEVYVDKSQGDASKVTAQGPGLEPSGNIANKTTYFEIFTAGAGTGEVEVVIQDPMGQKGTVEPQLEARGDSTYRCSYQPTMEGVHTVHVTFAGVPIPRSPYTVTVGQACNPSACRAVGRGLQPKGVRVKETADFKVYTKGAGSGELKVTVKGPKGEERVKQKDLGDGVYGFEYYPMVPGTYIVTITWGGQNIGRSPFEVKVGTECGNQKVRAWGPGLEGGVVGKSADFVVEAIGDDVGTLGFSVEGPSQAKIECDDKGDGSCDVRYWPQEAGEYAVHVLCNSEDIRLSPFMADIRDAPQDFHPDRVKARGPGLEKTGVAVNKPAEFTVDAKHGGKAPLRVQVQDNEGCPVEALVKDNGNGTYSCSYVPRKPVKHTAMVSWGGVSIPNSPFRVNVGAGSHPNKVKVYGPGVAKTGLKAHEPTYFTVDCAEAGQGDVSIGIKCAPGVVGPAEADIDFDIIRNDNDTFTVKYTPRGAGSYTIMVLFADQATPTSPIRVKVEPSHDASKVKAEGPGLSRTGVELGKPTHFTVNAKAAGKGKLDVQFSGLTKGDAVRDVDIIDHHDNTYTVKYTPVQQGPVGVNVTYGGDPIPKSPFSVAVSPSLDLSKIKVSGLGEKVDVGKDQEFTVKSKGAGGQGKVASKIVGPSGAAVPCKVEPGLGADNSVVRFLPREEGPYEVEVTYDGVPVPGSPFPLEAVAPTKPSKVKAFGPGLQGGSAGSPARFTIDTKGAGTGGLGLTVEGPCEAQLECLDNGDGTCSVSYVPTEPGDYNINILFADTHIPGSPFKAHVVPCFDASKVKCSGPGLERATAGEVGQFQVDCSSAGSAELTIEICSEAGLPAEVYIQDHGDGTHTITYIPLCPGAYTVTIKYGGQPVPNFPSKLQVEPAVDTSGVQCYGPGIEGQGVFREATTEFSVDARALTQTGGPHVKARVANPSGNLTETYVQDRGDGMYKVEYTPYEEGLHSVDVTYDGSPVPSSPFQVPVTEGCDPSRVRVHGPGIQSGTTNKPNKFTVETRGAGTGGLGLAVEGPSEAKMSCMDNKDGSCSVEYIPYEAGTYSLNVTYGGHQVPGSPFKVPVHDVTDASKVKCSGPGLSPGMVRANLPQSFQVDTSKAGVAPLQVKVQGPKGLVEPVDVVDNADGTQTVNYVPSREGPYSISVLYGDEEVPRSPFKVKVLPTHDASKVKASGPGLNTTGVPASLPVEFTIDAKDAGEGLLAVQITDPEGKPKKTHIQDNHDGTYTVAYVPDVTGRYTILIKYGGDEIPFSPYRVRAVPTGDASKCTVTGAGIGPTIQIGEETVITVDTKAAGKGKVTCTVCTPDGSEVDVDVVENEDGTFDIFYTAPQPGKYVICVRFGGEHVPNSPFQVTALAGDQPSVQPPLRSQQLAPQYTYAQGGQQTWAPERPLVGVNGLDVTSLRPFDLVIPFTIKKGEITGEVRMPSGKVAQPTITDNKDGTVTVRYAPSEAGLHEMDIRYDNMHIPGSPLQFYVDYVNCGHVTAYGPGLTHGVVNKPATFTVNTKDAGEGGLSLAIEGPSKAEISCTDNQDGTCSVSYLPVLPGDYSILVKYNEQHVPGSPFTARVTGDDSMRMSHLKVGSAADIPINISETDLSLLTATVVPPSGREEPCLLKRLRNGHVGISFVPKETGEHLVHVKKNGQHVASSPIPVVISQSEIGDASRVRVSGQGLHEGHTFEPAEFIIDTRDAGYGGLSLSIEGPSKVDINTEDLEDGTCRVTYCPTEPGNYIINIKFADQHVPGSPFSVKVTGEGRVKESITRRRRAPSVANVGSHCDLSLKIPEISIQDMTAQVTSPSGKTHEAEIVEGENHTYCIRFVPAEMGTHTVSVKYKGQHVPGSPFQFTVGPLGEGGAHKVRAGGPGLERAEAGVPAEFSIWTREAGAGGLAIAVEGPSKAEISFEDRKDGSCGVAYVVQEPGDYEVSVKFNEEHIPDSPFVVPVASPSGDARRLTVSSLQESGLKVNQPASFAVSLNGAKGAIDAKVHSPSGALEECYVTEIDQDKYAVRFIPRENGVYLIDVKFNGTHIPGSPFKIRVGEPGHGGDPGLVSAYGAGLEGGVTGNPAEFVVNTSNAGAGALSVTIDGPSKVKMDCQECPEGYRVTYTPMAPGSYLISIKYGGPYHIGGSPFKAKVTGPRLVSNHSLHETSSVFVDSLTKATCAPQHGAPGPGPADASKVVAKGLGLSKAYVGQKSSFTVDCSKAGNNMLLVGVHGPRTPCEEILVKHVGSRLYSVSYLLKDKGEYTLVVKWGDEHIPGSPYRVVVP

SEQ ID NO: 55 - protein, 2647 aa, Homo sapiens
MSSSHSRAGQSAAGAAPGGGVDTRDAEMPATEKDLAEDAPWKKIQQNTFTRWCNEHLKCVSKRIANLQTDLSDGLRLIALLEVLSQKKMHRKHNQRPTFRQMQLENVSVALEFLDRESIKLVSIDSKAIVDGNLKLILGLIWTLILHYSISMPMWDEEEDEEAKKQTPKQRLLGWIQNKLPQLPITNFSRDWQSGRALGALVDSCAPGLCPDWDSWDASKPVTNAREAMQQADDWLGIPQVITPEEIVDPNVDEHSVMTYLSQFPKAKLKPGAPLRPKLNPKKARAYGPGIEPTGNMVKKRAEFTVETRSAGQGEVLVYVEDPAGHQEEAKVTANNDKNRTFSVWYVPEVTGTHKVTVLFAGQHIAKSPFEVYVDKSQGDASKVTAQGPGLEPSGNIANKTTYFEIFTAGAGTGEVEVVIQDPMGQKGTVEPQLEARGDSTYRCSYQPTMEGVHTVHVTFAGVPIPRSPYTVTVGQACNPSACRAVGRGLQPKGVRVKETADFKVYTKGAGSGELKVTVKGPKGEERVKQKDLGDGVYGFEYYPMVPGTYIVTITWGGQNIGRSPFEVKVGTECGNQKVRAWGPGLEGGVVGKSADFVVEAIGDDVGTLGFSVEGPSQAKIECDDKGDGSCDVRYWPQEAGEYAVHVLCNSEDIRLSPFMADIRDAPQDFHPDRVKARGPGLEKTGVAVNKPAEFTVDAKHGGKAPLRVQVQDNEGCPVEALVKDNGNGTYSCSYVPRKPVKHTAMVSWGGVSIPNSPFRVNVGAGSHPNKVKVYGPGVAKTGLKAHEPTYFTVDCAEAGQGDVSIGIKCAPGVVGPAEADIDFDIIRNDNDTFTVKYTPRGAGSYTIMVLFADQATPTSPIRVKVEPSHDASKVKAEGPGLSRTGVELGKPTHFTVNAKAAGKGKLDVQFSGLTKGDAVRDVDIIDHHDNTYTVKYTPVQQGPVGVNVTYGGDPIPKSPFSVAVSPSLDLSKIKVSGLGEKVDVGKDQEFTVKSKGAGGQGKVASKIVGPSGAAVPCKVEPGLGADNSVVRFLPREEGPYEVEVTYDGVPVPGSPFPLEAVAPTKPSKVKAFGPGLQGGSAGSPARFTIDTKGAGTGGLGLTVEGPCEAQLECLDNGDGTCSVSYVPTEPGDYNINILFADTHIPGSPFKAHVVPCFDASKVKCSGPGLERATAGEVGQFQVDCSSAGSAELTIEICSEAGLPAEVYIQDHGDGTHTITYIPLCPGAYTVTIKYGGQPVPNFPSKLQVEPAVDTSGVQCYGPGIEGQGVFREATTEFSVDARALTQTGGPHVKARVANPSGNLTETYVQDRGDGMYKVEYTPYEEGLHSVDVTYDGSPVPSSPFQVPVTEGCDPSRVRVHGPGIQSGTTNKPNKFTVETRGAGTGGLGLAVEGPSEAKMSCMDNKDGSCSVEYIPYEAGTYSLNVTYGGHQVPGSPFKVPVHDVTDASKVKCSGPGLSPGMVRANLPQSFQVDTSKAGVAPLQVKVQGPKGLVEPVDVVDNADGTQTVNYVPSREGPYSISVLYGDEEVPRSPFKVKVLPTHDASKVKASGPGLNTTGVPASLPVEFTIDAKDAGEGLLAVQITDPEGKPKKTHIQDNHDGTYTVAYVPDVTGRYTILIKYGGDEIPFSPYRVRAVPTGDASKCTVTVSIGGHGLGAGIGPTIQIGEETVITVDTKAAGKGKVTCTVCTPDGSEVDVDVVENEDGTFDIFYTAPQPGKYVICVRFGGEHVPNSPFQVTALAGDQPSVQPPLRSQQLAPQYTYAQGGQQTWAPERPLVGVNGLDVTSLRPFDLVIPFTIKKGEITGEVRMPSGKVAQPTITDNKDGTVTVRYAPSEAGLHEMDIRYDNMHIPGSPLQFYVDYVNCGHVTAYGPGLTHGVVNKPATFTVNTKDAGEGGLSLAIEGPSKAEISCTDNQDGTCSVSYLPVLPGDYSILVKYNEQHVPGSPFTARVTGDDSMRMSHLKVGSAADIPINISETDLSLLTATVVPPSGREEPCLLKRLRNGHVGISFVPKETGEHLVHVKKNGQHVASSPIPVVISQSEIGDASRVRVSGQGLHEGHTFEPAEFIIDTRDAGYGGLSLSIEGPSKVDINTEDLEDGTCRVTYCPTEPGNYIINIKFADQHVPGSPFSVKVTGEGRVKESITRRRRAPSVANVGSHCDLSLKIPEISIQDMTAQVTSPSGKTHEAEIVEGENHTYCIRFVPAEMGTHTVSVKYKGQHVPGSPFQFTVGPLGEGGAHKVRAGGPGLERAEAGVPAEFSIWTREAGAGGLAIAVEGPSKAEISFEDRKDGSCGVAYVVQEPGDYEVSVKFNEEHIPDSPFVVPVASPSGDARRLTVSSLQESGLKVNQPASFAVSLNGAKGAIDAKVHSPSGALEECYVTEIDQDKYAVRFIPRENGVYLIDVKFNGTHIPGSPFKIRVGEPGHGGDPGLVSAYGAGLEGGVTGNPAEFVVNTSNAGAGALSVTIDGPSKVKMDCQECPEGYRVTYTPMAPGSYLISIKYGGPYHIGGSPFKAKVTGPRLVSNHSLHETSSVFVDSLTKATCAPQHGAPGPGPADASKVVAKGLGLSKAYVGQKSSFTVDCSKAGNNMLLVGVHGPRTPCEEILVKHVGSRLYSVSYLLKDKGEYTLVVKWGDEHIPGSPYRVVVP

SEQ ID NO: 56 - protein, 2647 aa, Homo sapiens
MSSSHSRAGQSAAGAAPGGGVDTRDAEMPATEKDLAEDAPWKKIQQNTFTRWCNEHLKCVSKRIANLQTDLSDGLRLIALLEVLSQKKMHRKHNQRPTFRQMQLENVSVALEFLDRESIKLVSIDSKAIVDGNLKLILGLIWTLILHYSISMPMWDEEEDEEAKKQTPKQRLLGWIQNKLPQLPITNFSRDWQSGRALGALVDSCAPGLCPDWDSWDASKPVTNAREAMQQADDWLGIPQVITPEEIVDPNVDEHSVMTYLSQFPKAKLKPGAPLRPKLNPKKARAYGPGIEPTGNMVKKRAEFTVETRSAGQGEVLVYVEDPAGHQEEAKVTANNDKNRTFSVWYVPEVTGTHKVTVLFAGQHIAKSPFEVYVDKSQGDASKVTAQGPGLEPSGNIANKTTYFEIFTAGAGTGEVEVVIQDPMGQKGTVEPQLEARGDSTYRCSYQPTMEGVHTVHVTFAGVPIPRSPYTVTVGQACNPSACRAVGRGLQPKGVRVKETADFKVYTKGAGSGELKVTVKGPKGEERVKQKDLGDGVYGFEYYPMVPGTYIVTITWGGQNIGRSPFEVKVGTECGNQKVRAWGPGLEGGVVGKSADFVVEAIGDDVGTLGFSVEGPSQAKIECDDKGDGSCDVRYWPQEAGEYAVHVLCNSEDIRLSPFMADIRDAPQDFHPDRVKARGPGLEKTGVAVNKPAEFTVDAKHGGKAPLRVQVQDNEGCPVEALVKDNGNGTYSCSYVPRKPVKHTAMVSWGGVSIPNSPFRVNVGAGSHPNKVKVYGPGVAKTGLKAHEPTYFTVDCAEAGQGDVSIGIKCAPGVVGPAEADIDFDIIRNDNDTFTVKYTPRGAGSYTIMVLFADQATPTSPIRVKVEPSHDASKVKAEGPGLSRTGVELGKPTHFTVNAKAAGKGKLDVQFSGLTKGDAVRDVDIIDHHDNTYTVKYTPVQQGPVGVNVTYGGDPIPKSPFSVAVSPSLDLSKIKVSGLGEKVDVGKDQEFTVKSKGAGGQGKVASKIVGPSGAAVPCKVEPGLGADNSVVRFLPREEGPYEVEVTYDGVPVPGSPFPLEAVAPTKPSKVKAFGPGLQGGSAGSPARFTIDTKGAGTGGLGLTVEGPCEAQLECLDNGDGTCSVSYVPTEPGDYNINILFADTHIPGSPFKAHVVPCFDASKVKCSGPGLERATAGEVGQFQVDCSSAGSAELTIEICSEAGLPAEVYIQDHGDGTHTITYIPLCPGAYTVTIKYGGQPVPNFPSKLQVEPAVDTSGVQCYGPGIEGQGVFREATTEFSVDARALTQTGGPHVKARVANPSGNLTETYVQDRGDGMYKVEYTPYEEGLHSVDVTYDGSPVPSSPFQVPVTEGCDPSRVRVHGPGIQSGTTNKPNKFTVETRGAGTGGLGLAVEGPSEAKMSCMDNKDGSCSVEYIPYEAGTYSLNVTYGGHQVPGSPFKVPVHDVTDASKVKCSGPGLSPGMVRANLPQSFQVDTSKAGVAPLQVKVQGPKGLVEPVDVVDNADGTQTVNYVPSREGPYSISVLYGDEEVPRSPFKVKVLPTHDASKVKASGPGLNTTGVPASLPVEFTIDAKDAGEGLLAVQITDPEGKPKKTHIQDNHDGTYTVAYVPDVTGRYTILIKYGGDEIPFSPYRVRAVPTGDASKCTVTVSIGGHGLGAGIGPTIQIGEETVITVDTKAAGKGKVTCTVCTPDGSEVDVDVVENEDGTFDIFYTAPQPGKYVICVRFGGEHVPNSPFQVTALAGDQPSVQPPLRSQQLAPQYTYAQGGQQTWAPERPLVGVNGLDVTSLRPFDLVIPFTIKKGEITGEVRMPSGKVAQPTITDNKDGTVTVRYAPSEAGLHEMDIRYDNMHIPGSPLQFYVDYVNCGHVTAYGPGLTHGVVNKPATFTVNTKDAGEGGLSLAIEGPSKAEISCTDNQDGTCSVSYLPVLPGDYSILVKYNEQHVPGSPFTARVTGDDSMRMSHLKVGSAADIPINISETDLSLLTATVVPPSGREEPCLLKRLRNGHVGISFVPKETGEHLVHVKKNGQHVASSPIPVVISQSEIGDASRVRVSGQGLHEGHTFEPAEFIIDTRDAGYGGLSLSIEGPSKVDINTEDLEDGTCRVTYCPTEPGNYIINIKFADQHVPGSPFSVKVTGEGRVKESITRRRRAPSVANVGSHCDLSLKIPEISIQDMTAQVTSPSGKTHEAEIVEGENHTYCIRFVPAEMGTHTVSVKYKGQHVPGSPFQFTVGPLGEGGAHKVRAGGPGLERAEAGVPAEFSIWTREAGAGGLAIAVEGPSKAEISFEDRKDGSCGVAYVVQEPGDYEVSVKFNEEHIPDSPFVVPVASPSGDARRLTVSSLQESGLKVNQPASFAVSLNGAKGAIDAKVHSPSGALEECYVTEIDQDKYAVRFIPRENGVYLIDVKFNGTHIPGSPFKIRVGEPGHGGDPGLVSAYGAGLEGGVTGNPAEFVVNTSNAGAGALSVTIDGPSKVKMDCQECPEGYRVTYTPMAPGSYLISIKYGGPYHIGGSPFKAKVTGPRLVSNHSLHETSSVFVDSLTKATCAPQHGAPGPGPADASKVVAKGLGLSKAYVGQKSSFTVDCSKAGNNMLLVGVHGPRTPCEEILVKHVGSRLYSVSYLLKDKGEYTLVVKWGHEHIPGSPYRVVVP

SEQ ID NO: 57 - protein, 2337 aa, Homo sapiens [sequence omitted]

SEQ ID NO: 58 - protein, 1508 aa, Homo sapiens
MSSSHSRAGQSAAGAAPGGGVDTRDAEMPATEKDLAEDAPWKKIQQNTFTRWCNEHLKCVSKRIANLQTDLSDGLRLIALLEVLSQKKMHRKHNQRPTFRQMQLENVSVALEFLDRESIKLVSIDSKAIVDGNLKLILGLIWTLILHYSISMPMWDEEEDEEAKKQTPKQRLLGWIQNKLPQLPITNFSRDWQSGRALGALVDSCAPGLCPDWDSWDASKPVTNAREAMQQADDWLGIPQVITPEEIVDPNVDEHSVMTYLSQFPKAKLKPGAPLRPKLNPKKARAYGPGIEPTGNMVKKRAEFTVETRSAGQGEVLVYVEDPAGHQEEAKVTANNDKNRTFSVWYVPEVTGTHKVTVLFAGQHIAKSPFEVYVDKSQGDASKVTAQGPGLEPSGNIANKTTYFEIFTAGAGTGEVEVVIQDPMGQKGTVEPQLEARGDSTYRCSYQPTMEGVHTVHVTFAGVPIPRSPYTVTVGQACNPSACRAVGRGLQPKGVRVKETADFKVYTKGAGSGELKVTVKGPKGEERVKQKDLGDGVYGFEYYPMVPGTYIVTITWGGQNIGRSPFEVKVGTECGNQKVRAWGPGLEGGVVGKSADFVVEAIGDDVGTLGFSVEGPSQAKIECDDKGDGSCDVRYWPQEAGEYAVHVLCNSEDIRLSPFMADIRDAPQDFHPDRVKARGPGLEKTGVAVNKPAEFTVDAKHGGKAPLRVQVQDNEGCPVEALVKDNGNGTYSCSYVPRKPVKHTAMVSWGGVSIPNSPFRVNVGAGSHPNKVKVYGPGVAKTGLKAHEPTYFTVDCAEAGQGDVSIGIKCAPGVVGPAEADIDFDIIRNDNDTFTVKYTPRGAGSYTIMVLFADQATPTSPIRVKVEPSHDASKVKAEGPGLSRTGVELGKPTHFTVNAKAAGKGKLDVQFSGLTKGDAVRDVDIIDHHDNTYTVKYTPVQQGPVGVNVTYGGDPIPKSPFSVAVSPSLDLSKIKVSGLGEKVDVGKDQEFTVKSKGAGGQGKVASKIVGPSGAAVPCKVEPGLGADNSVVRFLPREEGPYEVEVTYDGVPVPGSPFPLEAVAPTKPSKVKAFGPGLQGGSAGSPARFTIDTKGAGTGGLGLTVEGPCEAQLECLDNGDGTCSVSYVPTEPGDYNINILFADTHIPGSPFKAHVVPCFDASKVKCSGPGLERATAGEVGQFQVDCSSAGSAELTIEICSEAGLPAEVYIQDHGDGTHTITYIPLCPGAYTVTIKYGGQPVPNFPSKLQVEPAVDTSGVQCYGPGIEGQGVFREATTEFSVDARALTQTGGPHVKARVANPSGNLTETYVQDRGDGMYKVEYTPYEEGLHSVDVTYDGSPVPSSPFQVPVTEGCDPSRVRVHGPGIQSGTTNKPNKFTVETRGAGTGGLGLAVEGPSEAKMSCMDNKDGSCSVEYIPYEAGTYSLNVTYGGHQVPGSPFKVPVHDVTDASKVKCSGPGLSPGMVRANLPQSFQVDTSKAGVAPLQVKVQGPKGECLHAWSQGSGGQCPV

SEQ ID NO: 59 - protein, 2480 aa, Homo sapiens
MSSSHSRAGQSAAGAAPGGGVDTRDAEMPATEKDLAEDAPWKKIQQNTFTRWCNEHLKCVSKRIANLQTDLSDGLRLIALLEVLSQKKMHRKHNQRPTFRQMQLENVSVALEFLDRESIKLVSIDSKAIVDGNLKLILGLIWTLILHYSISMPMWDEEEDEEAKKQTPKQRLLGWIQNKLPQLPITNFSRDWQSGRALGALVDSCAPGLCPDWDSWDASKPVTNAREAMQQADDWLGIPQVITPEEIVDPNVDEHSVMTYLSQFPKAKLKPGAPLRPKLNPKKARAYGPGIEPTGNMVKKRAEFTVETRSAGQGEVLVYVEDPAGHQEEAKVTANNDKNRTFSVWYVPEVTGTHKVTVLFAGQHIAKSPFEVYVDKSQGDASKVTAQGPGLEPSGNIANKTTYFEIFTAGAGTGEVEVVIQDPMGQKGTVEPQLEARGDSTYRCSYQPTMEGVHTVHVTFAGVPIPRSPYTVTVGQACNPSACRAVGRGLQPKGVRVKETADFKVYTKGAGSGELKVTVKGPKGEERVKQKDLGDGVYGFEYYPMVPGTYIVTITWGGQNIGRSPFEVKVGTECGNQKVRAWGPGLEGGVVGKSADFVVEAIGDDVGTLGFSVEGPSQAKIECDDKGDGSCDVRYWPQEAGEYAVHVLCNSEDIRLSPFMADIRDAPQDFHPDRVKARGPGLEKTGVAVNKPAEFTVDAKHGGKAPLRVQVQDNEGCPVEALVKDNGNGTYSCSYVPRKPVKHTAMVSWGGVSIPNSPFRVNVGAGSHPNKVKVYGPGVAKTGLKAHEPTYFTVDCAEAGQGDVSIGIKCAPGVVGPAEADIDFDIIRNDNDTFTVKYTPRGAGSYTIMVLFADQATPTSPIRVKVEPSHDASKVKAEGPGLSRTGVELGKPTHFTVNAKAAGKGKLDVQFSGLTKGDAVRDVDIIDHHDNTYTVKYTPVQQGPVGVNVTYGGDPIPKSPFSVAVSPSLDLSKIKVSGLGEKVDVGKDQEFTVKSKGAGGQGKVASKIVGPSGAAVPCKVEPGLGADNSVVRFLPREEGPYEVEVTYDGVPVPGSPFPLEAVAPTKPSKVKAFGPGLQGGSAGSPARFTIDTKGAGTGGLGLTVEGPCEAQLECLDNGDGTCSVSYVPTEPGDYNINILFADTHIPGSPFKAHVVPCFDASKVKCSGPGLERATAGEVGQFQVDCSSAGSAELTIEICSEAGLPAEVYIQDHGDGTHTITYIPLCPGAYTVTIKYGGQPVPNFPSKLQVEPAVDTSGVQCYGPGIEGQGVFREATTEFSVDARALTQTGGPHVKARVANPSGNLTETYVQDRGDGMYKVEYTPYEEGLHSVDVTYDGSPVPSSPFQVPVTEGCDPSRVRVHGPGIQSGTTNKPNKFTVETRGAGTGGLGLAVEGPSEAKMSCMDNKDGSCSVEYIPYEAGTYSLNVTYGGHQVPGSPFKVPVHDVTDASKVKCSGPGLSPGMVRANLPQSFQVDTSKAGVAPLQVKVQGPKGLVEPVDVVDNADGTQTVNYVPSREGPYSISVLYGDEEVPRSPFKVKVLPTHDASKVKASGPGLNTTGVPASLPVEFTIDAKDAGEGLLAVQITDPEGKPKKTHIQDNHDGTYTVAYVPDVTGRYTILIKYGGDEIPFSPYRVRAVPTGDASKCTVTVSIGGHGLGAGIGPTIQIGEETVITVDTKAAGKGKVTCTVCTPDGSEVDVDVVENEDGTFDIFYTAPQPGKYVICVRFGGEHVPNSPFQVTALAGDQPSVQPPLRSQQLAPQYTYAQGGQQTWAPERPLVGVNGLDVTSLRPFDLVIPFTIKKGEITGEVRMPSGKVAQPTITDNKDGTVTVRYAPSEAGLHEMDIRYDNMHIPGSPLQFYVDYVNCGHVTAYGPGLTHGVVNKPATFTVNTKDAGEGGLSLAIEGPSKAEISCTDNQDGTCSVSYLPVLPGDYSILVKYNEQHVPGSPFTARVTGDDSMRMSHLKVGSAADIPINISETDLSLLTATVVPPSGREEPCLLKRLRNGHVGISFVPKETGEHLVHVKKNGQHVASSPIPVVISQSEIGDASRVRVSGQGLHEGHTFEPAEFIIDTRDAGYGGLSLSIEGPSKVDINTEDLEDGTCRVTYCPTEPGNYIINIKFADQHVPGSPFSVKVTGEGRVKESITRRRRAPSVANVGSHCDLSLKIPEISIQDMTAQVTSPSGKTHEAEIVEGENHTYCIRFVPAEMGTHTVSVKYKGQHVPGSPFQFTVGPLGEGGAHKVRAGGPGLERAEAGVPAEFSIWTREAGAGGLAIAVEGPSKAEISFEDRKDGSCGVAYVVQEPGDYEVSVKFNEEHIPDSPFVVPVASPSGDARRLTVSSLQVRHREKPPTWGSWARTDQSHRRDQALALCSVTPLAQLWVPGLCSGRVQPTLGVGRKYPAHHVEFFSCLRSKGFEQKPVPLEHQGCGLKRDSLPRLGAAHRVGQPSLPATWVCATAECGGRGGDVRLWLAAPCKSVALPL

SEQ ID NO: 60 - protein, 362 aa, Homo sapiens
MRVTAPRTVLLLLSGALALTETWAGSHSMRYFYTAMSRPGRGEPRFIAVGYVDDTQFVRFDSDAASPRMAPRAPWIEQEGPEYWDRETQKYKRQAQTDRVSLRNLRGYYNQSEAGSHTLQRMYGCDVGPDGRLLRGHDQSAYDGKDYIALNEDLSSWTAADTAAQITQRKWEAAREAEQWRAYLEGLCVEWLRRYLENGKETLQRADPPKTHVTHHPISDHEATLRCWALGFYPAEITLTWQRDGEDQTQDTELVETRPAGDRTFQKWAAVVVPSGEEQRYTCHVQHEGLPKPLTLRWEPSSQSTIPIVGIVAGLAVLAVVVIGAVVATVMCRRKSSGGKGGSYSQAASSDSAQGSDVSLTA

SEQ ID NO: 61 - protein, 366 aa, Homo sapiens [sequence omitted]

SEQ ID NO: 62 - protein, 362 aa, Homo sapiens [sequence omitted]

SEQ ID NO: 63 - protein, 362 aa, Homo sapiens [sequence omitted]

SEQ ID NO: 64 - protein, 362 aa, Homo sapiens [sequence omitted]

SEQ ID NO: 65 - protein, 362 aa, Homo sapiens [sequence omitted]

SEQ ID NO: 66 - protein, 362 aa, Homo sapiens [sequence omitted]

SEQ ID NO: 67 - protein, 342 aa, Homo sapiens
CSHSMRYFDTAVSRPGAGEPRFISVGYVDDTQFVRFDSDAASPRGEPRAPWVEQEGPEYWDRETQKYKRQAQADRVSLRNLRGYYNQSEDGSHTLQRMSGCDLGPDGRLLRGYDQSAYDGKDYIALNEDLRSWTAADTAAQITQRKWEAARAAEQLRAYLEGLCVEWLRRYLENGKETLQRAEPPKTHVTHHPLSDHEATLRCWALGFYPAEITLTWQRDGEDQTQDTELVETRPAGDGTFQKWAAVVVPSGQEQRYTCHMQHEGLQEPLTLSWEPSSQPTIPIMGIVAGLAVLVVLAVLGAVVTAMMCRRKSSGGKGGSCSQAACSNSAQGSDESLITCKA

SEQ ID NO: 68 - protein, 362 aa, Homo sapiens [sequence omitted]

SEQ ID NO: 69 - protein, 362 aa, Homo sapiens [sequence omitted]

SEQ ID NO: 70 - protein, 362 aa, Homo sapiens [sequence omitted]

SEQ ID NO: 71 - protein, 362 aa, Homo sapiens [sequence omitted]

SEQ ID NO: 72 - protein, 362 aa, Homo sapiens [sequence omitted]

SEQ ID NO: 73 - protein, 366 aa, Homo sapiens [sequence omitted]

SEQ ID NO: 74 - protein, 362 aa, Homo sapiens [sequence omitted]

SEQ ID NO: 75 - protein, 362 aa, Homo sapiens [sequence omitted]

SEQ ID NO: 76 - protein, 362 aa, Homo sapiens [sequence omitted]

SEQ ID NO: 77 - protein, 362 aa, Homo sapiens [sequence omitted]

SEQ ID NO: 78 - protein, 366 aa, Homo sapiens
MRVMAPRTLILLLSGALALTETWAGSHSMRYFYTAVSRPGRGEPHFIAVGYVDDTQFVRFDSDAASPRGEPRAPWVEQEGPEYWDRETQKYKRQAQTDRVSLRNLRGYYNQSEAGSHIIQRMYGCDVGPDGRLLRGYDQYAYDGKDYIALNEDLRSWTAADTAAQITQRKWEAAREAEQLRAYLEGLCVEWLRRYLKNGKETLQRAEHPKTHVTHHPVSDHEATLRCWALGFYPAEITLTWQWDGEDQTQDTELVETRPAGDGTFQKWAAVVVPSGEEQRYTCHVQHEGLPEPLTLRWEPSSQPTIPIVGIVAGLAVLAVLAVLGAVVAVVMCRRKSSGGKGGSCSQAASSNSAQGSDESLIACKA

SEQ ID NO: 79 - protein, 362 aa, Homo sapiens [sequence omitted]

SEQ ID NO: 80 - protein, 362 aa, Homo sapiens
MRVTAPRTVLLLLSGALALTETWAGSHSMRYFYTAMSRPGRGEPRFIAVGYVDDTQFVRFDSDAASPRMAPRAPWIEQEGPEYWDRETQISKTNTQTYRESLRNLRGYYNQSEAGSHTLQRMYGCDVGPDGRLLRGHDQSAYDGKDYIALNEDLSSWTAADTAAQITQRKWEAAREAEQWRAYLEGLCVEWLRRYLENGKETLQRADPPKTHVTHHPISDHEATLRCWALGFYPAEITLTWQRDGEDQTQDTELVETRPAGDRTFQKWAAVVVPSGEEQRYTCHVQHEGLPKPLTLRWEPSSQSTIPIVGIVAGLAVLAVVVIGAVVATVMCRRKSSGGKGGSYSQAASSDSAQGSDVSLTA

SEQ ID NO: 81 - protein, 362 aa, Homo sapiens [sequence omitted]

SEQ ID NO: 82 - protein, 362 aa, Homo sapiens [sequence omitted]

SEQ ID NO: 83 - protein, 362 aa, Homo sapiens [sequence omitted]

SEQ ID NO: 84 - protein, 362 aa, Homo sapiens [sequence omitted]

SEQ ID NO: 85 - protein, 362 aa, Homo sapiens [sequence omitted]

SEQ ID NO: 86 - protein, 362 aa, Homo sapiens [sequence omitted]

SEQ ID NO: 87 - protein, 362 aa, Homo sapiens [sequence omitted]

SEQ ID NO: 88 - protein, 362 aa, Homo sapiens [sequence omitted]

SEQ ID NO: 89 - protein, 362 aa, Homo sapiens [sequence omitted]

SEQ ID NO: 90 - protein, 376 aa, Homo sapiens
MLPLSIKDDEYKPPKFNLFGKISGWFRSILSDKTSRNLFFFLCLNLSFAFVELLYGIWSNCLGLISDSFHMFFDSTAILAGLAASVISKWRDNDAFSYGYVRAEVLAGFVNGLFLIFTAFFIFSEGVERALAPPDVHHERLLLVSILGFVVNLIGIFVFKHGGHGHSHGSGHGHSHSLFNGALDQAHGHVDHCHSHEVKHGAAHSHDHAHGHGHFHSHDGPSLKETTGPSRQILQGVFLHILADTLGSIGVIASAIMMQNFGLMIADPICSILIAILIVVSVIPLLRESVGILMQRTPPLLENSLPQCYQRVQQLQGVYSLQEQHFWTLCSDVYVGTLKLIVAPDADARWILSQTHNIFTQAGVRQLYVQIDFAAM

SEQ ID NO: 91 - protein, 376 aa, Homo sapiens; identical to SEQ ID NO: 90

SEQ ID NO: 92 - protein, 879 aa, Homo sapiens [sequence omitted]

SEQ ID NO: 93 - protein, 861 aa, Homo sapiens
MEALGPGPPASLFQPPRRPGLGTVGKPIRLLANHFQVQIPKIDVYHYDVDIKPEKRPRRVNREVVDTMVRHFKMQIFGDRQPGYDGKRNMYTAHPLPIGRDRVDMEVTLPGEGKDQTFKVSVQWVSVVSLQLLLEALAGHLNEVPDDSVQALDVITRHLPSMRYTPVGRSFFSPPEGYYHPLGGGREVWFGFHQSVRPAMWNMMLNIDVSATAFYRAQPIIEFMCEVLDIQNINEQTKPLTDSQRVKFTKEIRGLKVEVTHCGQMKRKYRVCNVTRRPASHQTFPLQLENGQAMECTVAQYFKQKYSLQLKYPHLPCLQVGQEQKHTYLPLEVCNIVAGQRCIKKLTDNQTSTMIKATARSAPDRQEEISRLVKSNSMVGGPDPYLKEFGIVVHNEMTELTGRVLPAPMLQYGGRNKTVATPNQGVWDMRGKQFYAGIEIKVWAVACFAPQKQCREDLLKSFTDQLRKISKDAGMPIQGQPCFCKYAQGADSVEPMFKHLKMTYVGLQLIVVILPGKTPVYAEVKRVGDTLLGMATQCVQVKNVVKTSPQTLSNLCLKINAKLGGINNVLVPHQRPSVFQQPVIFLGADVTHPPAGDGKKPSIAAVVGSMDGHPSRYCATVRVQTSRQEISQELLYSQEVIQDLTNMVRELLIQFYKSTRFKPTRIIYYRGGVSEGQMKQVAWPELIAIRKACISLEEDYRPGITYIVVQKRHHTRLFCADKTERVGKSGNVPAGTTVDSTITHPSEFDFYLCSHAGIQGTSRPSHYQVLWDDNCFTADELQLLTYQLCHTYVRCTRSVSIPAPAYYARLVAFRARYHLVDKDHDSAEGSHVSGQSNGRDPQALAKAVQIHHDTQHTMYFA

SEQ ID NO: 94 - protein, 860 aa, Homo sapiens [sequence omitted]

SEQ ID NO: 95 - protein, 846 aa, Homo sapiens [sequence omitted]

SEQ ID NO: 96 - protein, 857 aa, Homo sapiens
MEAGPSGAAAGAYLPPLQQVFQAPRRPGIGTVGKPIKLLANYFEVDIPKIDVYHYEVDIKPDKCPRRVNREVVEYMVQHFKPQIFGDRKPVYDGKKNIYTVTALPIGNERVDFEVTIPGEGKDRIFKVSIKWLAIVSWRMLHEALVSGQIPVPLESVQALDVAMRHLASMRYTPVGRSFFSPPEGYYHPLGGGREVWFGFHQSVRPAMWKMMLNIDVSATAFYKAQPVIEFMCEVLDIRNIDEQPKPLTDSQRVRFTKEIKGLKVEVTHCGQMKRKYRVCNVTRRPASHQTFPLQLESGQTVECTVAQYFKQKYNLQLKYPHLPCLQVGQEQKHTYLPLEVCNIVAGQRCIKKLTDNQTSTMIKATARSAPDRQEEISRLMKNASYNLDPYIQEFGIKVKDDMTEVTGRVLPAPILQYGGRNRAIATPNQGVWDMRGKQFYNGIEIKVWAIACFAPQKQCREEVLKNFTDQLRKISKDAGMPIQGQPCFCKYAQGADSVEPMFRHLKNTYSGLQLIIVILPGKTPVYAEVKRVGDTLLGMATQCVQVKNVVKTSPQTLSNLCLKINVKLGGINNILVPHQRSAVFQQPVIFLGADVTHPPAGDGKKPSITAVVGSMDAHPSRYCATVRVQRPRQEIIEDLSYMVRELLIQFYKSTRFKPTRIIFYRDGVPEGQLPQILHYELLAIRDACIKLEKDYQPGITYIVVQKRHHTRLFCADKNERIGKSGNIPAGTTVDTNITHPFEFDFYLCSHAGIQGTSRPSHYYVLWDDNRFTADELQILTYQLCHTYVRCTRSVSIPAPAYYARLVAFRARYHLVDKEHDSGEGSHISGQSNGRDPQALAKAVQVHQDTLRTMYFA

SEQ ID NO: 97 - protein, 860 aa, Homo sapiens
MEIGSAGPAGAQPLLMVPRRPGYGTMGKPIKLLANCFQVEIPKIDVYLYEVDIKPDKCPRRVNREVVDSMVQHFKVTIFGDRRPVYDGKRSLYTANPLPVATTGVDLDVTLPGEGGKDRPFKVSIKFVSRVSWHLLHEVLTGRTLPEPLELDKPISTNPVHAVDVVLRHLPSMKYTPVGRSFFSAPEGYDHPLGGGREVWFGFHQSVRPAMWKMMLNIDVSATAFYKAQPVIQFMCEVLDIHNIDEQPRPLTDSHRVKFTKEIKGLKVEVTHCGTMRRKYRVCNVTRRPASHQTFPLQLENGQTVERTVAQYFREKYTLQLKYPHLPCLQVGQEQKHTYLPLEVCNIVAGQRCIKKLTDNQTSTMIKATARSAPDRQEEISRLVRSANYETDPFVQEFQFKVRDEMAHVTGRVLPAPMLQYGGRNRTVATPSHGVWDMRGKQFHTGVEIKMWAIACFATQRQCREEILKGFTDQLRKISKDAGMPIQGQPCFCKYAQGADSVEPMFRHLKNTYSGLQLIIVILPGKTPVYAEVKRVGDTLLGMATQCVQVKNVIKTSPQTLSNLCLKINVKLGGINNILVPHQRPSVFQQPVIFLGADVTHPPAGDGKKPSIAAVVGSMDAHPSRYCATVRVQRPRQEIIQDLASMVRELLIQFYKSTRFKPTRIIFYRDGVSEGQFRQVLYYELLAIREACISLEKDYQPGITYIVVQKRHHTRLFCADRTERVGRSGNIPAGTTVDTDITHPYEFDFYLCSHAGIQGTSRPSHYHVLWDDNCFTADELQLLTYQLCHTYVRCTRSVSIPAPAYYAHLVAFRARYHLVDKEHDSAEGSHVSGQSNGRDPQALAKAVQIHQDTLRTMYFA

SEQ ID NO: 98 - protein, 857 aa, Homo sapiens; identical to SEQ ID NO: 96

SEQ ID NO: 99 - protein, 860 aa, Homo sapiens; identical to SEQ ID NO: 97

SEQ ID NO: 100 - protein, 338 aa, Homo sapiens
MLSALARPASAALRRSFSTSAQNNAKVAVLGASGGIGQPLSLLLKNSPLVSRLTLYDIAHTPGVAADLSHIETKAAVKGYLGPEQLPDCLKGCDVVVIPAGVPRKPGMTRDDLFNTNATIVATLTAACAQHCPEAMICVIANPVNSTIPITAEVFKKHGVYNPNKIFGVTTLDIVRANTFVAELKGLDPARVNVPVIGGHAGKTIIPLISQCTPKVDFPQDQLTALTGRIQEAGTEVVKAKAGAGSATLSMAYAGARFVFSLVDAMNGKEGVVECSFVKSQETECTYFSTPLLLGKKGIEKNLGIGKVSSFEEKMISDAIPELKASIKKGEDFVKTLK

SEQ ID NO: 101 - protein, 338 aa, Homo sapiens [sequence omitted]

SEQ ID NO: 102 - protein, 338 aa, Homo sapiens; identical to SEQ ID NO: 100

SEQ ID NO: 103 - protein, 338 aa, Homo sapiens; identical to SEQ ID NO: 100

SEQ ID NO: 104 - protein, 512 aa, Homo sapiens
MKAIIHLTLLALLSVNTATNQGNSADAVTTTETATSGPTVAAADTTETNFPETASTTANTPSFPTATSPAPPIISTHSSSTIPTPAPPIISTHSSSTIPIPTAADSESTTNVNSLATSDIITASSPNDGLITMVPSETQSNNEMSPTTEDNQSSGPPTGTALLETSTLNSTGPSNPCQDDPCADNSLCVKLHNTSFCLCLEGYYYNSSTCKKGKVFPGKISVTVSETFDPEEKHSMAYQDLHSEITSLFKDVFGTSVYGQTVILTVSTSLSPRSEMRADDKFVNVTIVTILAETTSDNEKTVTEKINKAIRSSSSNFLNYDLTLRCDYYGCNQTADDCLNGLACDCKSDLQRPNPQSPFCVASSLKCPDACNAQHKQCLIKKSGGAPECACVPGYQEDANGNCQKCAFGYSGLDCKDKFQLILTIVGTIAGIVILSMIIALIVTARSNNKTKHIEEENLIDEDFQNLKLRSTGFTNLGAEGSVFPKVRITASRDSQMQNPYSRHSSMPRPDY

SEQ ID NO: 105 - protein, 512 aa, Homo sapiens [sequence omitted]

SEQ ID NO: 106 - protein, 357 aa, Homo sapiens
MATTVPDGCRNGLKSKYYRLCDKAEAWGIVLETVATAGVVTSVAFMLTLPILVCKVQDSNRRKMLPTQFLFLLGVLGIFGLTFAFIIGLDGSTGPTRFFLFGILFSICFSCLLAHAVSLTKLVRGRKPLSLLVILGLAVGFSLVQDVIAIEYIVLTMNRTNVNVFSELSAPRRNEDFVLLLTYVLFLMALTFLMSSFTFCGSFTGWKRHGAHIYLTMLLSIAIWVAWITLLMLPDFDRRWDDTILSSALAANGWVFLLAYVSPEFWLLTKQRNPMDYPVEDAFCKPQLVKKSYGVENRAYSQEEITQGFEETGDTLYAPYSTHFQLQNQPPQKEFSIPRAHAWPSPYKDYEVKKEGS

SEQ ID NO: 107 - protein, 357 aa, Homo sapiens; identical to SEQ ID NO: 106

SEQ ID NO: 108 - protein, 584 aa, Homo sapiens
MCYTHALFLQRQLRPRRSEAGRFRPRALRPDVSVARSAVTKSAGLYWRGPDGRGLCGAVLGDTRRCPVLAMADYLISGGTSYVPDDGLTAQQLFNCGDGLTYNDFLILPGYIDFTADQVDLTSALTKKITLKTPLVSSPMDTVTEAGMAIAMALTGGIGFIHHNCTPEFQANEVRKVKKYEQGFITDPVVLSPKDRVRDVFEAKARHGFCGIPITDTGRMGSRLVGIISSRDIDFLKEEEHDCFLEEIMTKREDLVVAPAGITLKEANEILQRSKKGKLPIVNEDDELVAIIARTDLKKNRDYPLASKDAKKQLLCGAAIGTHEDDKYRLDLLAQAGVDVVVLDSSQGNSIFQINMIKYIKDKYPNLQVIGGNVVTAAQAKNLIDAGVDALRVGMGSGSICITQEVLACGRPQATAVYKVSEYARRFGVPVIADGGIQNVGHIAKALALGASTVMMGSLLAATTEAPGEYFFSDGIRLKKYRGMGSLDAMDKHLSSQNRYFSEADKIKVAQGVSGAVQDKGSIHKFVPYLIAGIQHSCQDIGAKSLTQVRAMMYSGELKFEKRTSSAQVEGGVHSLHSYEKRLF

SEQ ID NO: 109 - protein, 584 aa, Homo sapiens; identical to SEQ ID NO: 108

SEQ ID NO: 110 - protein, 514 aa, Homo sapiens
MADYLISGGTSYVPDDGLTAQQLFNCGDGLTYNDFLILPGYIDFTADQVDLTSALTKKITLKTPLVSSPMDTVTEAGMAIAMALTGGIGFIHHNCTPEFQANEVRKVKKYEQGFITDPVVLSPKDRVRDVFEAKARHGFCGIPITDTGRMGSRLVGIISSRDIDFLKEEEHDCFLEEIMTKREDLVVAPAGITLKEANEILQRSKKGKLPIVNEDDELVAIIARTDLKKNRDYPLASKDAKKQLLCGAAIGTHEDDKYRLDLLAQAGVDVVVLDSSQGNSIFQINMIKYIKDKYPNLQVIGGNVVTAAQAKNLIDAGVDALRVGMGSGSICITQEVLACGRPQATAVYKVSEYARRFGVPVIADGGIQNVGHIAKALALGASTVMMGSLLAATTEAPGEYFFSDGIRLKKYRGMGSLDAMDKHLSSQNRYFSEADKIKVAQGVSGAVQDKGSIHKFVPYLIAGIQHSCQDIGAKSLTQVRAMMYSGELKFEKRTSSAQVEGGVHSLHSYEKRLF

SEQ ID NO: 111 - protein, 584 aa, Homo sapiens; identical to SEQ ID NO: 108

SEQ ID NO: 112 - protein, 511 aa, Homo sapiens
MCYTHALFLQRQLRPRRSEAGRFRPRALRPDVSVARSAVTKSAGLYWRGPDGRGLCGAVLGDTRRCPVLAMADYLISGGTSYVPDDGLTAQTSALTKKITLKTPLVSSPMDTVTEAGMAIAMALTGGIGFIHHNCTPEFQANEVRKVKKYEQGFITDPVVLSPKDRVRDVFEAKARHGFCGIPITDTGRMGSRLVGIISSRDIDFLKEEEHDCFLEEIMTKREDLVVAPAGITLKEANEILQRSKKGARTDLKKNRDYPLASKDAKKQLLCGAAIGTHEDDKYRLDLLAQAGVDVVVLDSSQGNSIFQINMIKYIKDKYPNLQVIGGNVVTAAQAKNLIDAGVDALRVGMGSGSICITQEVLACGRPQATAVYKVSEYARRFGVPVIADGGIQNVGHIAKALALGASTVMMGSLLAATTEAPGEYFFSDGIRLKKYRGMGSLDAMDKHLSSQNRYFSEADKIKVAQGVSGAVQDKGSIHKFVPYLIAGIQHSCQDIGAKSLTQSHDVLWGA

SEQ ID NO: 113 - protein, 464 aa, Homo sapiens
MCYTHALFLQRQLRPRRSEAGRFRPRALRPDVSVARSAVTKSAGLYWRGPDGRGLCGAVLGDTRRCPVLAMADYLISGGTSYVPDDGLTAQQLFNCGDGLTYNDFLILPGYIDFTADQVDLTSALTKKITLKTPLVSSPMDTVTEAGMAIAMALTGGIGFIHHNCTPEFQANEVRKVKKYEQGFITDPVVLSPKDRVRDVFEAKARHGFCGIPITDTGRMGSRLVGIISSRDIDFLKEEEHDCFLEEIMTKREDLVVAPAGITLKEANEILQRSKKGKLPIVNEDDELVAIIARTDLKKNRDYPLASKDAKKQLLCGAAIGTHEDDKYRLDLLAQAGVDVVVLDSSQGNSIFQINMIKYIKDKYPNLQVIGGNVVTAAQAKNLIDAGVDALRVGMGSGSICITQEVLACGRPQATAVYKVSEYARRFGVPVIADGGIQNVGHIAKALALGAVRSHDGLSPGCHH

SEQ ID NO: 114 - protein, 584 aa, Homo sapiens; identical to SEQ ID NO: 108

SEQ ID NO: 115 - protein, 417 aa, Homo sapiens
MSLSNKLTLDKLDVKGKRVVMRVDFNVPMKNNQITNNQRIKAAVPSIKFCLDNGAKSVVLMSHLGRPDGVPMPDKYSLEPVAVELKSLLGKDVLFLKDCVGPEVEKACANPAAGSVILLENLRFHVEEEGKGKDASGNKVKAEPAKIEAFRASLSKLGDVYVNDAFGTAHRAHSSMVGVNLPQKAGGFLMKKELNYFAKALESPERPFLAILGGAKVADKIQLINNMLDKVNEMIIGGGMAFTFLKVLNNMEIGTSLFDEEGAKIVKDLMSKAEKNGVKITLPVDFVTADKFDENAKTGQATVASGIPAGWMGLDCGPESSKKYAEAVTRAKQIVWNGPVGVFEWEAFARGTKALMDEVVKATSRGCITIIGGGDTATCCAKWNTEDKVSHVSTGGGASLELLEGKVLPGVDALSNI

SEQ ID NO: 116 - protein, 168 aa, Homo sapiens
MEDKIYDRQVTKQSLSFRVVDQQQVERHFTMNELTELYTFEPDLLDDPNSEKKKKRDTPMLPKGLDCGPESSKKYAEAVTRAKQIVWNGPVGVFEWEAFARGTKALMDEVVKATSRGCITIIGGGDTATCCAKWNTEDKVSHVSTGGGASLELLEGKVLPGVDALSNI

SEQ ID NO: 117 - protein, 417 aa, Homo sapiens; identical to SEQ ID NO: 115

SEQ ID NO: 118 - protein, 410 aa, Homo sapiens
MSLSNKLTLDKLDVKGKRVVMRVDFNVPMKNNQITNNQRIKAAVPSIKFCLDNGAKSVVLMSHLGRPDGVPMPDKYSLEPVAVELKSLLGKDVLFLKDCVGPEVEKACANPAAGSVILLENLRFHVEEEGKGKDASGNKVKAEPAKIEAFRASLSKLGDVYVNDAFGTAHRAHSSMVGVNLPQKAGGFLMKKELNYFAKALESPERPFLAILGGAKVADKIQLINNMLDKVNEMIIGGGMAFTFLKVLNNMEIGTSLFDEEGAKIVKDLMSKAEKNGVKITLPVDFVTADKFDENAKTGQATVASGIPAGWMGLDCGPESSKKYAEAVTRAKQIVWNGPVGVFEWEAFARGTKALMDEVVKATSRGCITIIGGGDTATCCAKWNTEDKVSHVSTGGGASLELLEVPVHSP

SEQ ID NO: 119 - protein, 356 aa, Homo sapiens
TLWRGKLSSTLLLVFNFHTAQVSSSLPLLRDVLFLKDCVGPEVEKACANPAAGSVILLENLRFHVEEEGKGKDASGNKVKAEPAKIEAFRASLSKLGDVYVNDAFGTAHRAHSSMVGVNLPQKAGGFLMKKELNYFAKALESPERPFLAILGGAKVADKIQLINNMLDKVNEMIIGGGMAFTFLKVLNNMEIGTSLFDEEGAKIVKDLMSKAEKNGVKITLPVDFVTADKFDENAKTGQATVASGIPAGWMGLDCGPESSKKYAEAVTRAKQIVWNGPVGVFEWEAFARGTKALMDEVVKATSRGCITIIGGGDTATCCAKWNTEDKVSHVSTGGGASLELLEGKVLPGVDALSNI

SEQ ID NO: 120 - protein, 417 aa, Homo sapiens
SLSNKLTLDKLDVKGKRVVMRVDFNVPMKNNQITNNQRIKAAVPSIKFCLDNGAKSVVLMSHLGRPDGVPMPDKYSLEPVAVELKSLLGKDVLFLKDCVGPEVEKACANPAAGSVILLENLRFHVEEEGKGKDASGNKVKAEPAKIEAFRASLSKLGDVYVNDAFGTAHRAHSSMVGVNLPQKAGGFLMKKELNYFAKALESPERPFLAILGGAKVADKIQLINNMLDKVNEMIIGGGMAFTFLKVLNNMEIGTSLFDEEGAKIVKDLMSKAEKNGVKITLPVDFVTADKFDENAKTGQATVASGIPAGWMGLDCGPESSKKYAEAVTRAKQIVWNGPVGVFEWEAFARGTKALMDEVVKATSRGCITIIGGGDTATCCAKWNTEDKVSHVSTGGGASLELLEGKVLPGVDALSNIL

SEQ ID NO: 121 - protein, 241 aa, Homo sapiens
MQCFSFIKTMMILFNLLIFLCGAALLAVGIWVSIDGASFLKIFGPLSSSAMQFVNVGYFLIAAGVVVFALGFLGCYGAKTESKCALVTFFFILLLIFIAEVAAAVVALVYTTMAEHFLTLLVVPAIKKDYGSQEDFTQVWNTTMKGLKCCGFTNYTDFEDSPYFKENSAFPPFCCNDNVTNTANETCTKQKAHDQKVEGCFNQLLYDIRTNAVTVGGVAAGIGGLELAAMIVSMYLYCNLQ

SEQ ID NO: 122 - protein, 241 aa, Homo sapiens; identical to SEQ ID NO: 121

SEQ ID NO: 123 - protein, 241 aa, Homo sapiens; identical to SEQ ID NO: 121

SEQ ID NO: 124 - protein, 241 aa, Homo sapiens; identical to SEQ ID NO: 121

SEQ ID NO: 125 - protein, 241 aa, Homo sapiens; identical to SEQ ID NO: 121

SEQ ID NO: 126 - protein, 241 aa, Homo sapiens; identical to SEQ ID NO: 121

SEQ ID NO: 127 - protein, 640 aa, Homo sapiens
MALSRGLPRELAEAVAGGRVLVVGAGGIGCELLKNLVLTGFSHIDLIDLDTIDVSNLNRQFLFQKKHVGRSKAQVAKESVLQFYPKANIVAYHDSIMNPDYNVEFFRQFILVMNALDNRAARNHVNRMCLAADVPLIESGTAGYLGQVTTIKKGVTECYECHPKPTQRTFPGCTIRNTPSEPIHCIVWAKYLFNQLFGEEDADQEVSPDRADPEAAWEPTEAEARARASNEDGDIKRISTKEWAKSTGYDPVKLFTKLFKDDIRYLLTMDKLWRKRKPPVPLDWAEVQSQGEETNASDQQNEPQLGLKDQQVLDVKSYARLFSKSIETLRVHLAEKGDGAELIWDKDDPSAMDFVTSAANLRMHIFSMNMKSRFDIKSMAGNIIPAIATTNAVIAGLIVLEGLKILSGKIDQCRTIFLNKQPNPRKKLLVPCALDPPNPNCYVCASKPEVTVRLNVHKVTVLTLQDKIVKEKFAMVAPDVQIEDGKGTILISSEEGETEANNHKKLSEFGIRNGSRLQADDFLQDYTLLINILHSEDLGKDVEFEVVGDAPEKVGPKQAEDAAKSITNGSDDGAQPSTSTAQEQDDVLIVDSDEEDSSNNADVSEEERSRKRKLDEKENLSAKRSRIEQKEELDDVIALD

SEQ ID NO: 128 - protein, 640 aa, Homo sapiens; identical to SEQ ID NO: 127

SEQ ID NO: 129 - protein, 640 aa, Homo sapiens; identical to SEQ ID NO: 127

SEQ ID NO: 130 - protein, 499 aa, Homo sapiens
MELSEPIVENGETEMSPEESWEHKEEISEAEPGGGSLGDGRPPEESAHEMMEEEEEIPKPKSVVAPPGAPKKEHVNVVFIGHVDAGKSTIGGQIMYLTGMVDKRTLEKYEREAKEKNRETWYLSWALDTNQEERDKGKTVEVGRAYFETEKKHFTILDAPGHKSFVPNMIGGASQADLAVLVISARKGEFETGFEKGGQTREHAMLAKTAGVKHLIVLINKMDDPTVNWSNERYEECKEKLVPFLKKVGFNPKKDIHFMPCSGLTGANLKEQSDFCPWYIGLPFIPYLDNLPNFNRSVDGPIRLPIVDKYKDMGTVVLGKLESGSICKGQQLVMMPNKHNVEVLGILSDDVETDTVAPGENLKIRLKGIEEEEILPGFILCDPNNLCHSGRTFDAQIVIIEHKSIICPGYNAVLHIHTCIEEVEITALICLVDKKSGEKSKTRPRFVKQDQVCIARLRTAGTICLETFKDFPQMGRFTLRDEGKTIAIGKVLKLVPEKD

SEQ ID NO: 131 - protein, 499 aa, Homo sapiens; identical to SEQ ID NO: 130

SEQ ID NO: 132 - protein, 637 aa, Homo sapiens
MDPGSGGGGGGGGGGGSSSGSSSSDSAPDCWDQADMEAPGPGPCGGGGSLAAAAEAQRENLSAAFSRQLNVNAKPFVPNVHAAEFVPSFLRGPAAPPPPAGGAANNHGAGSGAGGRAAPVESSQEEQSLCEGSNSAVSMELSEPIVENGETEMSPEESWEHKEEISEAEPGGGSLGDGRPPEESAHEMMEEEEEIPKPKSVVAPPGAPKKEHVNVVFIGHVDAGKSTIGGQIMYLTGMVDKRTLEKYEREAKEKNRETWYLSWALDTNQEERDKGKTVEVGRAYFETEKKHFTILDAPGHKSFVPNMIGGASQADLAVLVISARKGEFETGFEKGGQTREHAMLAKTAGVKHLIVLINKMDDPTVNWSNERYEECKEKLVPFLKKVGFNPKKDIHFMPCSGLTGANLKEQSDFCPWYIGLPFIPYLDNLPNFNRSVDGPIRLPIVDKYKDMGTVVLGKLESGSICKGQQLVMMPNKHNVEVLGILSDDVETDTVAPGENLKIRLKGIEEEEILPGFILCDPNNLCHSGRTFDAQIVIIEHKSIICPGYNAVLHIHTCIEEVEITALICLVDKKSGEKSKTRPRFVKQDQVCIARLRTAGTICLETFKDFPQMGRFTLRDEGKTIAIGKVLKLVPEKD

SEQ ID NO: 133 - protein, 628 aa, Homo sapiens
MDSGSSSSDSAPDCWDQVDMESPGLAPSGDGVSSAVAEAQREPLSSAFSRKLNVNAKPFVPNVHAAEFVPSFLRGPTQPPTLPAGSGSNDETCTGAGYPQGKRMGRGAPVEPSREEPLASLEGSNSAVTMELSEPVVENGEVEMALEESWEHSKEVSEAEPGGGSSGDSGPPEESGQEMMEEKEEIRKSKSVIVPSGAPKKEHVNVVFIGHVDAGKSTIGGQIMFLTGMVDKRTLEKYEREAKEKNRETWYLSWALDTNQEERDKGKTVEVGRAYFETERKHFTILDAPGHKGFVPNMIGGASQADLAVLVISARKGEFETGFEKGGQTREHAMLAKTAGVKHLIVLINKMDDPTVNWSIERYEECKEKLVPFLKKVGFSPKKDIHFMPCSGLTGANIKEQSDFCPWYTGLPFIPYLDNLPNFNRSIDGPIRLPIVDKYKDMGTVVLGKLESGSIFKGQQLVMMPNKHNVEVLGILSDDTETDFVAPGENLKIRLKGIEEEEILPGFILCDPSNLCHSGRTFDVQIVIIEHKSIICPGYNAVLHIHTCIEEVEITALISLVDKKSGEKSKTRPRFVKQDQVCIARLRTAGTICLETFKDFPQMGRFTLRDEGKTIAIGKVLKLVPEKD

SEQ ID NO: 134 - protein, 628 aa, Homo sapiens
MDSGSSSSDSAPDCWDQVDMESPGSAPSGDGVSSAVAEAQREPLSSAFSRKLNVNAKPFVPNVHAAEFVPSFLRGPTQPPTLPAGSGSNDETCTGAGYPQGKRMGRGAPVEPSREEPLVSLEGSNSAVTMELSEPVVENGEVEMALEESWEHSKEVSEAEPGGGSSGDSGPPEESGQEMMEEKEEIRKSKSVIVPSGAPKKEHVNVVFIGHVDAGKSTIGGQIMFLTGMVDKRTLEKYEREAKEKNRETWYLSWALDTNQEERDKGKTVEVGRAYFETERKHFTILDAPGHKSFVPNMIGGASQADLAVLVISARKGEFETGFEKGGQTREHAMLAKTAGVKHLIVLINKMDDPTVNWSIERYEECKEKLVPFLKKVGFSPKKDIHFMPCSGLTGANIKEQSDFCPWYTGLPFIPYLDNLPNFNRSIDGPIRLPIVDKYKDMGTVVLGKLESGSIFKGQQLVMMPNKHNVEVLGILSDDTETDFVAPGENLKIRLKGIEEEEILPGFILCDPSNLCHSGRTFDVQIVIIEHKSIICPGYNAVLHIHTCIEEVEITALISLVDKKSGEKSKTRPRFVKQDQVCIARLRTAGTICLETFKDFPQMGRFTLRDEGKTIAIGKVLKLVPEKD

SEQ ID NO: 135 - protein, 237 aa, Homo sapiens
MAGVSACIKYSMFTFNFLFWLCGILILALAIWVRVSNDSQAIFGSEDVGSSSYVAVDILIAVGAIIMILGFLGCCGAIKESRCMLLLFFIGLLLILLLQVATGILGAVFKSKSDRIVNETLYENTKLLSATGESEKQFQEAIIVFQEEFKCCGLVNGAADWGNNFQHYPELCACLDKQRPCQSYNGKQVYKETCISFIKDFLAKNLIIVIGISFGLAVIEILGLVFSMVLYCQIGNK

SEQ ID NO: 136 - protein, 237 aa, Homo sapiens; identical to SEQ ID NO: 135

SEQ ID NO: 137 - protein, 237 aa, Homo sapiens; identical to SEQ ID NO: 135

SEQ ID NO: 138 - protein, 237 aa, Homo sapiens; identical to SEQ ID NO: 135

SEQ ID NO: 139 - protein, 395 aa, Homo sapiens
MIKKFDKKDEESGSGSNPFQHLEKSAVLQEARIFNETPINPRRCLHILTKILYLLNQGEHFGTTEATEAFFAMTRLFQSNDQTLRRMCYLTIKEMATISEDVIIVTSSLTKDMTGKEDVYRGPAIRALCRITDGTMLQAIERYMKQAIVDKVSSVSSSALVSSLHMMKISYDVVKRWINEAQEAASSDNIMVQYHALGVLYHLRKNDRLAVSKMLNKFTKSGLKSQFAYCMLIRIASRLLKETEDGCTMKFTVRDCDPNTGVPDEDGYDDEYVLEDLEVTVSDHIQKVLKPNFAAAWEEVGDTFEKEETFALSSTKTLEEAVNNIITFLGMQPCERSDKVPENKNSHSLYLAGIFRGGYDLLVRSRLALADGVTMQVTVRSKERTPVDVILASVG

SEQ ID NO: 140 - protein, 874 aa, Homo sapiens
MLKKFDKKDEESGGGSNPFQHLEKSAVLQEARVFNETPINPRKCAHILTKILYLINQGEHLGTTEATEAFFAMTKLFQSNDPTLRRMCYLTIKEMSCIAEDVIIVTSSLTKDMTGKEDNYRGPAVRALCQITDSTMLQAIERYMKQAIVDKVPSVSSSALVSSLHLLKCSFDVVKRWVNEAQEAASSDNIMVQYHALGLLYHVRKNDRLAVNKMISKVTRHGLKSPFAYCMMIRVASKQLEEEDGSRDSPLFDFIESCLRNKHEMVVYEAASAIVNLPGCSAKELAPAVSVLQLFCSSPKAALRYAAVRTLNKVAMKHPSAVTACNLDLENLVTDSNRSIATLAITTLLKTGSESSIDRLMKQISSFMSEISDEFKVVVVQAISALCQKYPRKHAVLMNFLFTMLREEGGFEYKRAIVDCIISIIEENSESKETGLSHLCEFIEDCEFTVLATRILHLLGQEGPKTTNPSKYIRFIYNRVVLEHEEVRAGAVSALAKFGAQNEEMLPSILVLLKRCVMDDDNEVRDRATFYLNVLEQKQKALNAGYILNGLTVSIPGLERALQQYTLEPSEKPFDLKSVPLATAPMAEQRTESTPITAVKQPEKVAATRQEIFQEQLAAVPEFRGLGPLFKSSPEPVALTESETEYVIRCTKHTFTNHMVFQFDCTNTLNDQTLENVTVQMEPTEAYEVLCYVPARSLPYNQPGTCYTLVALPKEDPTAVACTFSCMMKFTVKDCDPTTGETDDEGYEDEYVLEDLEVTVADHIQKVMKLNFEAAWDEVGDEFEKEETFTLSTIKTLEEAVGNIVKFLGMHPCERSDKVPDNKNTHTLLLAGVFRGGHDILVRSRLLLLDTVTMQVTARSLEELPVDIILASVG

SEQ ID NO: 141 - protein, 871 aa, Homo sapiens
MIKKFDKKDEESGSGSNPFQHLEKSAVLQEARIFNETPINPRRCLHILTKILYLLNQGEHFGTTEATEAFFAMTRLFQSNDQTLRRMCYLTIKEMATISEDVIIVTSSLTKDMTGKEDVYRGPAIRALCRITDGTMLQAIERYMKQAIVDKVSSVSSSALVSSLHMMKISYDVVKRWINEAQEAASSDNIMVQYHALGVLYHLRKNDRLAVSKMLNKFTKSGLKSQFAYCMLIRIASRLLKETEDGHESPLFDFIESCLRNKHEMVIYEAASAIIHLPNCTARELAPAVSVLQLFCSSPKPALRYAAVRTLNKVAMKHPSAVTACNLDLENLITDSNRSIATLAITTLLKTGSESSVDRLMKQISSFVSEISDEFKVVVVQAISALCQKYPRKHSVMMTFLSNMLRDDGGFEYKRAIVDCIISIVEENPESKEAGLAHLCEFIEDCEHTVLATKILHLLGKEGPRTPVPSKYIRFIFNRVVLENEAVRAAAVSALAKFGAQNESLLPSILVLLQRCMMDTDDEVRDRATFYLNVLQQRQMALNATYIFNGLTVSVPGMEKALHQYTLEPSEKPFDMKSIPLAMAPVFEQKAEITLVATKPEKLAPSRQDIFQEQLAAIPEFLNIGPLFKSSEPVQLTEAETEYFVRCIKHMFTNHIVFQFDCTNTLNDQLLEKVTVQMEPSDSYEVLSCIPAPSLPYNQPGICYTLVRLPDDDPTAVAGSFSCTMKFTVRDCDPNTGVPDEDGYDDEYVLEDLEVTVSDHIQKVLKPNFAAAWEEVGDTFEKEETFALSSTKTLEEAVNNIITFLGMQPCERSDKVPENKNSHSLYLAGIFRGGYDLLVRSRLALADGVTMQVTVRSKERTPVDVILASVG

SEQ ID NO: 142 - protein, 871 aa, Homo sapiens; identical to SEQ ID NO: 141

SEQ ID NO: 143 - protein, 439 aa, Homo sapiens
MIKKFDKKDEESGSGSNPFQHLEKSAVLQEARIFNETPINPRRCLHILTKILYLLNQGEHFGTTEATEAFFAMTRLFQSNDQTLRRMCYLTIKEMATISEDVIIVTSSLTKDMTGKEDVYRGPAIRALCRITDGTMLQAIERYMKQAIVDKVSSVSSSALVSSLHMMKISYDVVKRWINEAQEAASSDNIMVQYHALGVLYHLRKNDRLAVSKMLNKFTKSGLKSQFAYCMLIRIASRLLKETEDGTIPPSLSEFVLEKNSLPPFVQHSHRLNTIFQVCLPSPPVAGSFSCTMKFTVRDCDPNTGVPDEDGYDDEYVLEDLEVTVSDHIQKVLKPNFAAAWEEVGDTFEKEETFALSSTKTLEEAVNNIITFLGMQPCERSDKVPENKNSHSLYLAGIFRGGYDLLVRSRLALADGVTMQVTVRSKERTPVDVILASVG

SEQ ID NO: 144 - protein, 874 aa, Homo sapiens; identical to SEQ ID NO: 140

SEQ ID NO: 145 - protein, 307 aa, Homo sapiens
MSSSYWSETSSSSCGTQQLPEVLQCQPQHYHCYHQSSQAQQPPEKNVVYERVRTYSGPMNKVVQALDPFNSREVLSPLKTTSSYQNLVWSDHSQELHSPTLKISTCAPSTLHITQNTEQELHSPTVKLTTYPQTTIRKYVVQNPEQEPLSQFLRGSHFFPGNNVIYEKTIRKVEKLNTDQGCHPQAQCHHHIIQQPQVIHSAHWQQPDSSQQIQAITGNNPISTHIGNELCHSGSSQICEQVIIQDDGPEKLDPRYFGELLADLSRKNTDLYHCLLEHLQRIGGRKQSLSSTYTIRHGIQTKRTGIL

SEQ ID NO: 146 - protein, 589 aa, Homo sapiens [sequence omitted]

SEQ ID NO: 147 - protein, 595 aa, Homo sapiens [sequence omitted]

SEQ ID NO: 148 - protein, 169 aa, Homo sapiens
MVPAVAVVKKDSGFQMNQLRGKKSCHTGLGRSAGWNIPIGLLYCDLPEPRKPLEKAVANFFSGSCAPCADGTDFPQLCQLCPGCGCSTLNQYFGYSGAFKCLKDGAGDVAFVKHSTIFENLANKADRDQYELLCLDNTRKPVDEYKDCHLAQVPSHTVVARSMGGKEDL

SEQ ID NO: 149 - protein, 698 aa, Homo sapiens
MRLAVGALLVCAVLGLCLAVPDKTVRWCAVSEHEATKCQSFRDHMKSVIPSDGPSVACVKKASYLDCIRAIAANEADAVTLDAGLVYDAYLAPNNLKPVVAEFYGSKEDPQTFYYAVAVVKKDSGFQMNQLRGKKSCHTGLGRSAGWNIPIGLLYCDLPEPRKPLEKAVANFFSGSCAPCADGTDFPQLCQLCPGCGCSTLNQYFGYSGAFKCLKDGAGDVAFVKHSTIFENLANKADRDQYELLCLDNTRKPVDEYKDCHLAQVPSHTVVARSMGGKEDLIWELLNQAQEHFGKDKSKEFQLFSSPHGKDLLFKDSAHGFLKVPPRMDAKMYLGYEYVTAIRNLREGTCPEAPTDECKPVKWCALSHHERLKCDEWSVNSVGKIECVSAETTEDCIAKIMNGEADAMSLDGGFVYIAGKCGLVPVLAENYNKSDNCEDTPEAGYFAVAVVKKSASDLTWDNLKGKKSCHTAVGRTAGWNIPMGLLYNKINHCRFDEFFSEGCAPGSKKDSSLCKLCMGSGLNLCEPNNKEGYYGYTGAFRCLVEKGDVAFVKHQTVPQNTGGKNPDPWAKNLNEKDYELLCLDGTRKPVEEYANCHLARAPNHAVVTRKDKEACVHKILRQQQHLFGSNVTDCSGNFCLFRSETKDLLFRDDTVCLAKLHDRNTYEKYLGEEYVKAVGNLRKCSTSSLLEACTFRRP

SEQ ID NO: 150 - protein, 698 aa, Homo sapiens; identical to SEQ ID NO: 149

SEQ ID NO: 151 - protein, 571 aa, Homo sapiens
MNQLRGKKSCHTGLGRSAGWNIPIGLLYCDLPEPRKPLEKAVANFFSGSCAPCADGTDFPQLCQLCPGCGCSTLNQYFGYSGAFKCLKDGAGDVAFVKHSTIFENLANKADRDQYELLCLDNTRKPVDEYKDCHLAQVPSHTVVARSMGGKEDLIWELLNQAQEHFGKDKSKEFQLFSSPHGKDLLFKDSAHGFLKVPPRMDAKMYLGYEYVTAIRNLREGTCPEAPTDECKPVKWCALSHHERLKCDEWSVNSVGKIECVSAETTEDCIAKIMNGEADAMSLDGGFVYIAGKCGLVPVLAENYNKSDNCEDTPEAGYFAVAVVKKSASDLTWDNLKGKKSCHTAVGRTAGWNIPMGLLYNKINHCRFDEFFSEGCAPGSKKDSSLCKLCMGSGLNLCEPNNKEGYYGYTGAFRCLVEKGDVAFVKHQTVPQNTGGKNPDPWAKNLNEKDYELLCLDGTRKPVEEYANCHLARAPNHAVVTRKDKEACVHKILRQQQHLFGSNVTDCSGNFCLFRSETKDLLFRDDTVCLAKLHDRNTYEKYLGEEYVKAVGNLRKCSTSSLLEACTFRRP

SEQ ID NO: 152 - protein, 105 aa, Homo sapiens
MCQGGDFTRHNGTGGKSIYGEKFEDENFILKHTGPGILSMANAGPNTNGSQFFICTAKTEWLDGKHVVFGKVKEGMNIVEAMERFGSRNGKTSKKITIADCGQLE

SEQ ID NO: 153 - protein, 125 aa, Homo sapiens
MGEKGFGCKGSRFHRIIPGFMCQGGDFTRHNGTGGKSIYGEKFDDENFILKHTGPGILSMANAGPNTNGSQFFICTAKSEWLDGKHVVFGKMKEGINIVEATGRFGSRNGKTSKKITIADCGQLE

SEQ ID NO: 154 - protein, 105 aa, Homo sapiens [sequence omitted]

SEQ ID NO: 155 - protein, 113 aa, Homo sapiens
SHHNGTGGKSIYTEKFEDENFILKHTGPGILSMANAGPNTNGSQFFICTAKSEWLDGKHVLFGKVKEGTNIVEAWSALGPGMARPARRSPLLTVDNSNKFDLCFILTTRPFLP

SEQ ID NO: 156 - protein, 164 aa, Homo sapiens
VNPTVFFDIAVDGEPLGRVSFELFADKVPKTAENFRALSTGEKGFGYKGSCFHRIIPGFMCQGGDFTRHNGTGGKSIYGEKFEDENFILKHTGPGILSMANAGPNTNGSQFFICTAKTEWLDGKHVVFGKVKEGMNIVEAMERFGSRNGKTSKKITIADCGQLE

SEQ ID NO: 157 - protein, 165 aa, Homo sapiens
MVNPTVFFDIAVDGEPLGRVSFELFADKVPKTAENFRALSTGEKGFGYKGSCFHRIIPGFMCQGGDFTRHNGTGGKSIYGEKFEDENFILKHTGPGILSMANAGPNTNGSQFFICTAKTEWLDGKHVVFGKVKEGMNIVEAMERFGSRNGKTSKKITIADCGQLE

SEQ ID NO: 158 - protein, 118 aa, Homo sapiens [sequence omitted]

SEQ ID NO: 159 - protein, 105 aa, Homo sapiens; identical to SEQ ID NO: 152

SEQ ID NO: 160 - protein, 179 aa, Homo sapiens
MSGVWEGRSPVVSAIVNPTVFFNIAINGEPLGCISFELFADKFPKTAENLRVLGMGEKGFGCKGSRFHRIIPGFMCQGGDFTRHNGTGGKSIYGEKFDDENFILKHTGPGILSMANAGPNTNGSQFFICTAKSEWLDGKHVVFGKMKEGINIVEATGRFGSRNGKTSKKITIADCGQLE

SEQ ID NO: 161 - protein, 167 aa, Homo sapiens
MRRQPLDCVSFELFADKVSKTAENFRALSTGEKGFGCKGSCFHRIIPGFMCQGGDFTCHNGTGGKSIYWEKFDDENFILKHTGPGILSMANAGPNTNGSQFFICTAKTKWLDGKHVAFGKVKEGMNIVEAMEGPGMARPARRSPLLTVDNSNKFDLCFILTSRPFLL

SEQ ID NO: 162 - protein, 98 aa, Homo sapiens
LHTHNGTGGKSIYGEKFGDENFILKHTGPGILSMANAGPNTNGSQFFICTAKTEWLDGKHVVCGKAKEGKNIVEAMERCGSRNGKTSKKITIADCEQL

SEQ ID NO: 163 - protein, 165 aa, Homo sapiens [sequence omitted]

SEQ ID NO: 164 - protein, 158 aa, Homo sapiens
MRSSRTHISGTFFHDHLFADKFPKTAENFRALSTGEKGFSYKGSCFHRIIPGFMYQGRDFTRHNGTGGKSIYGEKFEDENFILKHTGPGILSMANAGPNTNGSQFFICTAKTEWLDGKHVVFGKVKEGMNIMEAMERFGSRNGKTSKKITIADCGQLE

SEQ ID NO: 165 - protein, 165 aa, Homo sapiens [sequence omitted]

SEQ ID NO: 166 - protein, 105 aa, Homo sapiens; identical to SEQ ID NO: 152

SEQ ID NO: 167 - protein, 232 aa, Homo sapiens
MCRPHQRRLPSIGQMHCHSGEVADPIGRDGGARPGCGRGRTWYKRGGRPGSCRFADATAEENRVLLAMVNPTVFFDIAVDGEPLGRVSFELFADKVPKTAENFRALSTGEKGFGYKGSCFHRIIPGFMCQGGDFTRHNGTGGKSIYGEKFEDENFILKHTGPGILSMANAGPNTNGSQFFICTAKTEWLDGKHVVFGKVKEGMNIVEAMERFGSRNGKTSKKITIADCGQLE

SEQ ID NO: 168 - protein, 187 aa, Homo sapiens
MCRPHQRRLPSIGQMHCHSGEVADPIGRDGGARPGCGRGRTWYKRGGRPGSCRFADATAEENRVLLAMVNPTVFFDIAVDGEPLGRVSFELFADKVPKTAENFRALSTGEKGFGYKGSCFHRIIPGFMCQGGDFTRHNGTGGKSIYGEKFEDENFILKHTGPGILSMANAGPNTNGSQFFICTAKTE

SEQ ID NO: 169 - protein, 200 aa, Homo sapiens
MAKKTYDLLFKLLLIGDSGVGKTCVLFRFSDDAFNTTFISTIGIDFKIKTVELQGKKIKLQIWDTAGQERFHTITTSYYRGAMGIMLVYDITNGKSFENISKWLRNIDEHANEDVERMLLGNKCDMDDKRVVPKGKGEQIAREHGIRFFETSAKANINIEKAFLTLAEDILRKTPVKEPNSENVDISSGGGVTGWKSKCC

SEQ ID NO: 170 - protein, 200 aa, Homo sapiens; identical to SEQ ID NO: 169

SEQ ID NO: 171 - protein, 200 aa, Homo sapiens; identical to SEQ ID NO: 169

SEQ ID NO: 172 - protein, 339 aa, Homo sapiens
MNWELLLWLLVLCALLLLLVQLLRFLRADGDLTLLWAEWQGRRPEWELTDMVVWVTGASSGIGEELAYQLSKLGVSLVLSARRVHELERVKRRCLENGNLKEKDILVLPLDLTDTGSHEAATKAVLQEFGRIDILVNNGGMSQRSLCMDTSLDVYRKLIELNYLGTVSLTKCVLPHMIERKQGKIVTVNSILGIISVPLSIGYCASKHALRGFFNGLRTELATYPGIIVSNICPGPVQSNIVENSLAGEVTKTIGNNGDQSHKMTTSRCVRLMLISMANDLKEVWISEQPFLLVTYLWQYMPTWAWWITNKMGKKRIENFKSGVDADSSYFKIFKTKHD

SEQ ID NO: 173 - protein, 339 aa, Homo sapiens; identical to SEQ ID NO: 172

SEQ ID NO: 174 - protein, 339 aa, Homo sapiens; identical to SEQ ID NO: 172

SEQ ID NO: 175 - protein, 521 aa, Homo sapiens
MADNEKLDNQRLKNFKNKGRDLETMRRQRNEVVVELRKNKRDEHLLKRRNVPHEDICEDSDIDGDYRVQNTSLEAIVQNASSDNQGIQLSAVQAARKLLSSDRNPPIDDLIKSGILPILVHCLERDDNPSLQFEAAWALTNIASGTSEQTQAVVQSNAVPLFLRLLHSPHQNVCEQAVWALGNIIGDGPQCRDYVISLGVVKPLLSFISPSIPITFLRNVTWVMVNLCRHKDPPPPMETIQEILPALCVLIHHTDVNILVDTVWALSYLTDAGNEQIQMVIDSGIVPHLVPLLSHQEVKVQTAALRAVGNIVTGTDEQTQVVLNCDALSHFPALLTHPKEKINKEAVWFLSNITAGNQQQVQAVIDANLVPMIIHLLDKGDFGTQKEAAWAISNLTISGRKDQVAYLIQQNVIPPFCNLLTVKDAQVVQVVLDGLSNILKMAEDEAETIGNLIEECGGLEKIEQLQNHENEDIYKLAYEIIDQFFSSDDIDEDPSLVPEAIQGGTFGFNSSANVPTEGFQF

SEQ ID NO: 176 - protein, 521 aa, Homo sapiens; identical to SEQ ID NO: 175

SEQ ID NO: 177 - protein, 521 aa, Homo sapiens; identical to SEQ ID NO: 175

SEQ ID NO: 178 - protein, 430 aa, Homo sapiens
MALLHSGRVLPGIAAAFHPGLAAAASARASSWWTHVEMGPPDPILGVTEAFKRDTNSKKMNLGVGAYRDDNGKPYVLPSVRKAEAQIAAKNLDKEYLPIGGLAEFCKASAELALGENSEVLKSGRFVTVQTISGTGALRIGASFLQRFFKFSRDVFLPKPTWGNHTPIFRDAGMQLQGYRYYDPKTCGFDFTGAVEDISKIPEQSVLLLHACAHNPTGVDPRPEQWKEIATVVKKRNLFAFFDMAYQGFASGDGDKDAWAVRHFIEQGINVCLCQSYAKNMGLYGERVGAFTMVCKDADEAKRVESQLKILIRPMYSNPPLNGARIAAAILNTPDLRKQWLQEVKGMADRIIGMRTQLVSNLKKEGSTHNWQHITDQIGMFCFTGLKPEQVERLIKEFSIYMTKDGRISVAGVTSSNVGYLAHAIHQVTK

SEQ ID NO: 179 - protein, 430 aa, Homo sapiens; identical to SEQ ID NO: 178

SEQ ID NO: 180 - protein, 430 aa, Homo sapiens; identical to SEQ ID NO: 178

SEQ ID NO: 181 - protein, 1071 aa, Homo sapiens
MPAIMTMLADHAARQLLDFSQKLDINLLDNVVNCLYHGEGAQQRMAQEVLTHLKEHPDAWTRVDTILEFSQNMNTKYYGLQILENVIKTRWKILPRNQCEGIKKYVVGLIIKTSSDPTCVEKEKVYIGKLNMILVQILKQEWPKHWPTFISDIVGASRTSESLCQNNMVILKLLSEEVFDFSSGQITQVKSKHLKDSMCNEFSQIFQLCQFVMENSQNAPLVHATLETLLRFLNWIPLGYIFETKLISTLIYKFLNVPMFRNVSLKCLTEIAGVSVSQYEEQFVTLFTLTMMQLKQMLPLNTNIRLAYSNGKDDEQNFIQNLSLFLCTFLKEHDQLIEKRLNLRETLMEALHYMLLVSEVEETEIFKICLEYWNHLAAELYRESPFSTSASPLLSGSQHFDVPPRRQLYLPMLFKVRLLMVSRMAKPEEVLVVENDQGEVVREFMKDTDSINLYKNMRETLVYLTHLDYVDTERIMTEKLHNQVNGTEWSWKNLNTLCWAIGSISGAMHEEDEKRFLVTVIKDLLGLCEQKRGKDNKAIIASNIMYIVGQYPRFLRAHWKFLKTVVNKLFEFMHETHDGVQDMACDTFIKIAQKCRRHFVQVQVGEVMPFIDEILNNINTIICDLQPQQVHTFYEAVGYMIGAQTDQTVQEHLIEKYMLLPNQVWDSIIQQATKNVDILKDPETVKQLGSILKTNVRACKAVGHPFVIQLGRIYLDMLNVYKCLSENISAAIQANGEMVTKQPLIRSMRTVKRETLKLISGWVSRSNDPQMVAENFVPPLLDAVLIDYQRNVPAAREPEVLSTMAIIVNKLGGHITAEIPQIFDAVFECTLNMINKDFEEYPEHRTNFFLLLQAVNSHCFPAFLAIPPTQFKLVLDSIIWAFKHTMRNVADTGLQILFTLLQNVAQEEAAAQSFYQTYFCDILQHIFSVVTDTSHTAGLTMHASILAYMFNLVEEGKISTSLNPGNPVNNQIFLQEYVANLLKSAFPHLQDAQVKLFVTGLFSLNQDIPAFKEHLRDFLVQIKEFAGEDTSDLFLEEREIALRQADEEKHKRQMSVPGIFNPHEIPEEMCD

SEQ ID NO: 182 - protein, 1071 aa, Homo sapiens; identical to SEQ ID NO: 181

SEQ ID NO: 183 - protein, 1071 aa, Homo sapiens; identical to SEQ ID NO: 181

SEQ ID NO: 184 - protein, 558 aa, Homo sapiens
MYRYLAKALLPSRAGPAALGSAANHSAALLGRGRGQPAAASQPGLALAARRHYSELVADREDDPNFFKMVEGFFDRGASIVEDKLVKDLRTQESEEQKRNRVRGILRIIKPCNHVLSLSFPIRRDDGSWEVIEGYRAQHSQHRTPCKGGIRYSTDVSVDEVKALASLMTYKCAVVDVPFGGAKAGVKINPKNYTENELEKITRRFTMELAKKGFIGPGVDVPAPDMNTGEREMSWIADTYASTIGHYDINAHACVTGKPISQGGIHGRISATGRGVFHGIENFINEASYMSILGMTPGFRDKTFVVQGFGNVGLHSMRYLHRFGAKCIAVGESDGSIWNPDGIDPKELEDFKLQHGSILGFPKAKPYEGSILEVDCDILIPAATEKQLTKSNAPRVKAKIIAEGANGPTTPEADKIFLERNILVIPDLYLNAGGVTVSYFEWLKNLNHVSYGRLTFKYERDSNYHLLLSVQESLERKFGKHGGTIPIVPTAEFQDSISGASEKDIVHSALAYTMERSARQIMHTAMKYNLGLDLRTAAYVNAIEKVFKVYSEAGVTFT

SEQ ID NO: 185 - protein, 478 aa, Homo sapiens
MYRYLVEDLRTRESEEQKRNRVRGILRIIKPCNHVLSLSFPIRRDDGSWEVIEGYRAQHSQHRTPCKGGIRYSTDVSVDEVKALASLMTYKCAVVDVPFGGAKAGVKINPKNYTDNELEKITRRFTMELAKKGFIGPGIDVPAPDMSTGEREMSWIADTYASTIGHYDINAHACVTGKPISQGGIHGRISATGRGVFHGIENFINEASYMSILGMTPGFGDKTFVVQGFGNVGLHSMRYLHRFGAKCIAVGESDGSIWNPDGIDPKELEDFKLQHGSILGFPKAKPYEGSILEADCDILIPAASEKQLTKSNAPRVKAKIIAEGANGPTTPEADKIFLERNIMVIPDLYLNAGGVTVSYFEWLKNLNHVSYGRLTFKYERDSNYHLLMSVQESLERKFGKHGGTIPIVPTAEFQDRISGASEKDIVHSGLAYTMERSARQIMRTAMKYNLGLDLRTAAYVNAIEKVFKVYNEAGVTFT

SEQ ID NO: 186 - protein, 475 aa, Homo sapiens
VASARGEGTAGQEQKRNRVRGILRIIKPCNHVLSLSFPIRRDDGSWEVIEGYRAQHSQHRTPCKGGIRYSTDVSVDEVKALASLMTYKCAVVDVPFGGAKAGVKINPKNYTDNELEKITRRFTMELAKKGFIGPGIDVPAPDMSTGEREMSWIADTYASTIGHYDINAHACVTGKPISQGGIHGRISATGRGVFHGIENFINEASYMSILGMTPGFGDKTFVVQGFGNVGLHSMRYLHRFGAKCIAVGESDGSIWNPDGIDPKELEDFKLQHGSILGFPKAKPYEGSILEADCDILIPAASEKQLTKSNAPRVKAKIIAEGANGPTTPEADKIFLERNIMVIPDLYLNAGGVTVSYFEWLKNLNHVSYGRLTFKYERDSNYHLLMSVQESLERKFGKHGGTIPIVPTAEFQDRISGASEKDIVHSGLAYTMERSARQIMRTAMKYNLGLDLRTAAYVNAIEKVFKVYNEAGVTFT

SEQ ID NO: 187 - protein, 558 aa, Homo sapiens; identical to SEQ ID NO: 184

SEQ ID NO: 188 - protein, 558 aa, Homo sapiens
MYRYLGEALLLSRAGPAALGSASADSAALLGWARGQPAAAPQPGLALAARRHYSEAVADREDDPNFFKMVEGFFDRGASIVEDKLVEDLRTRESEEQKRNRVRGILRIIKPCNHVLSLSFPIRRDDGSWEVIEGYRAQHSQHRTPCKGGIRYSTDVSVDEVKALASLMTYKCAVVDVPFGGAKAGVKINPKNYTDNELEKITRRFTMELAKKGFIGPGIDVPAPDMSTGEREMSWIADTYASTIGHYDINAHACVTGKPISQGGIHGRISATGRGVFHGIENFINEASYMSILGMTPGFGDKTFVVQGFGNVGLHSMRYLHRFGAKCIAVGESDGSIWNPDGIDPKELEDFKLQHGSILGFPKAKPYEGSILEADCDILIPAASEKQLTKSNAPRVKAKIIAEGANGPTTPEADKIFLERNIMVIPDLYLNAGGVTVSYFEWLKNLNHVSYGRLTFKYERDSNYHLLMSVQESLERKFGKHGGTIPIVPTAEFQDRISGASEKDIVHSGLAYTMERSARQIMRTAMKYNLGLDLRTAAYVNAIEKVFKVYNEAGVTFT

SEQ ID NO: 189 - protein, 558 aa, Homo sapiens; identical to SEQ ID NO: 188

SEQ ID NO: 190 - protein, 492 aa, Homo sapiens
PGGPAPWLAPCPQSPSSPLGGAQGEGTAGQQKRNRVRGILRIIKPCNHVLSLSFPIRRDDGSWEVIEGYRAQHSQHRTPCKGGIRYSTDVSVDEVKALASLMTYKCAVVDVPFGGAKAGVKINPKNYTENELEKITRRFTMELAKKGFIGPGVDVPAPDMNTGEREMSWIADTYASTIGHYDINAHACVTGKPISQGGIHGRISATGRGVFHGIENFINEASYMSILGMTPGFRDKTFVVQGFGNVGLHSMRYLHRFGAKCIAVGESDGSIWNPDGIDPKELEDFKLQHGSILGFPKAKPYEGSILEVDCDILIPAATEKQLTKSNAPRVKAKIIAEGANGPTTPEADKIFLERNILVIPDLYLNAGGVTVSYFEWLKNLNHVSYGRLTFKYERDSNYHLLLSVQESLERKFGKHGGTIPIVPTAEFQDSISGASEKDIVHSALAYTMERSARQIMHTAMKYNLGLDLRTAAYVNAIEKVFKVYSEAGVTFT

SEQ ID NO: 191 - protein, 558 aa, Homo sapiens; identical to SEQ ID NO: 188

SEQ ID NO: 192 - protein, 554 aa, Homo sapiens [sequence omitted]

SEQ ID NO: 193 - protein, 939 aa, Homo sapiens
MPAVSKGDGMRGLAVFISDIRNCKSKEAEIKRINKELANIRSKFKGDKALDGYSKKKYVCKLLFIFLLGHDIDFGHMEAVNLLSSNRYTEKQIGYLFISVLVNSNSELIRLINNAIKNDLASRNPTFMGLALHCIASVGSREMAEAFAGEIPKVLVAGDTMDSVKQSAALCLLRLYRTSPDLVPMGDWTSRVVHLLNDQHLGVVTAATSLITTLAQKNPEEFKTSVSLAVSRLSRIVTSASTDLQDYTYYFVPAPWLSVKLLRLLQCYPPPDPAVRGRLTECLETILNKAQEPPKSKKVQHSNAKNAVLFEAISLIIHHDSEPNLLVRACNQLGQFLQHRETNLRYLALESMCTLASSEFSHEAVKTHIETVINALKTERDVSVRQRAVDLLYAMCDRSNAPQIVAEMLSYLETADYSIREEIVLKVAILAEKYAVDYTWYVDTILNLIRIAGDYVSEEVWYRVIQIVINRDDVQGYAAKTVFEALQAPACHENLVKVGGYILGEFGNLIAGDPRSSPLIQFHLLHSKFHLCSVPTRALLLSTYIKFVNLFPEVKPTIQDVLRSDSQLRNADVELQQRAVEYLRLSTVASTDILATVLEEMPPFPERESSILAKLKKKKGPSTVTDLEDTKRDRSVDVNGGPEPAPASTSAVSTPSPSADLLGLGAAPPAPAGPPPSSGGSGLLVDVFSDSASVVAPLAPGSEDNFARFVCKNNGVLFENQLLQIGLKSEFRQNLGRMFIFYGNKTSTQFLNFTPTLICSDDLQPNLNLQTKPVDPTVEGGAQVQQVVNIECVSDFTEAPVLNIQFRYGGTFQNVSVQLPITLNKFFQPTEMASQDFFQRWKQLSNPQQEVQNIFKAKHPMDTEVTKAKIIGFGSALLEEVDPNPANFVGAGIIHTKTTQIGCLLRLEPNLQAQMYRLTLRTSKEAVSQRLCELLSAQF

SEQ ID NO: 194 - protein, 128 aa, Homo sapiens
MGIQGGSVLFGLLLVLAVFCHSGHSLQCYNCPNPTADCKTAVNCSSDFDACLITKAGLQVYNKCWKFEHCNFNDVTTRLRENELTYYCCKKDLCNFNEQLENGGTSLSEKTVLLLVTPFLAAAWSLHP

SEQ ID NO: 195 - protein, 155 aa, Homo sapiens
MRGLSAEAARGWKRILGAARFCGQSQWESKEGLSCSGCCSSWLSSAIQVSHSLQCYNCPNPTADCKTAVNCSSDFDACLITKAGLQVYNKCWKFEHCNFNDVTTRLRENELTYYCCKKDLCNFNEQLENGGTSLSEKTVLLLVTPFLAAAWSLHP

SEQ ID NO: 196 - protein, 128 aa, Homo sapiens; identical to SEQ ID NO: 194

SEQ ID NO: 197 - protein, 128 aa, Homo sapiens; identical to SEQ ID NO: 194

SEQ ID NO: 198 - protein, 390 aa, Homo sapiens
MAPPQVLAFGLLLAAATATFAAAQEGEARIGAELWSWAGLGGSGPRPSAPETGIIGRGPRGRAFQRGDRTVRPCSGSGPPRGRKRRGPSRGAASLRSFARLECVCENYKLAVNCFVNNNRQCQCTSVGAQNTVICSKLAAKCLVMKAEMNGSKLGRRAKPEGALQNNDGLYDPDCDESGLFKAKQCNGTSMCWCVNTAGVRRTDKDTEITCSERVRTYWIIIELKHKAREKPYDSKSLRTALQKEITTRYQLDPKFITSILYENNVITIDLVQNSSQKTQNDVDIADVAYYFEKDVKGESLFHSKKMDLTVNGEQLDLDPGQTLIYYVDEKAPEFSMQGLKAGVIAVIVVVVIAVVAGIVVLVISRKKRMAKYEKAEIKEMGEMHRELNA

SEQ ID NO: 199 - protein, 314 aa, Homo sapiens
MAPPQVLAFGLLLAAATATFAAAQEECVCENYKLAVNCFVNNNRQCQCTSVGAQNTVICSKLAAKCLVMKAEMNGSKLGRRAKPEGALQNNDGLYDPDCDESGLFKAKQCNGTSMCWCVNTAGVRRTDKDTEITCSERVRTYWIIIELKHKAREKPYDSKSLRTALQKEITTRYQLDPKFITSILYENNVITIDLVQNSSQKTQNDVDIADVAYYFEKDVKGESLFHSKKMDLTVNGEQLDLDPGQTLIYYVDEKAPEFSMQGLKAGVIAVIVVVVIAVVAGIVVLVISRKKRMAKYEKAEIKEMGEMHRELNA

SEQ ID NO: 200 - protein, 314 aa, Homo sapiens [sequence omitted]

SEQ ID NO: 201 - protein, 216 aa, Homo sapiens
MLRLSERNMKVLLAAALIAGSVFFLLLPGPSAADEKKKGPKVTVKVYFDLRIGDEDVGRVIFGLFGKTVPKTVDNFVALATGEKGFGYKNSKFHRVIKDFMIQGGDFTRGDGTGGKSIYGERFPDENFKLKHYGPGWVSMANAGKDTNGSQFFITTVKTAWLDGKHVVFGKVLEGMEVVRKVESTKTDSRDKPLKDVIIADCGKIEVEKPFAIAKE

SEQ ID NO: 202 - protein, 216 aa, Homo sapiens; identical to SEQ ID NO: 201

SEQ ID NO: 203 - protein, 208 aa, Homo sapiens
MKVLLAAALIAGSVFFLLLPGPSAADEKKKGPKVTVKVYFDLRIGDEDVGRVIFGLFGKTVPKTVDNFVALATGEKGFGYKNSKFHRVIKDFMIQGGDFTRGDGTGGKSIYGERFPDENFKLKHYGPGWVSMANAGKDTNGSQFFITTVKTAWLDGKHVVFGKVLEGMEVVRKVESTKTDSRDKPLKDVIIADCGKIEVEKPFAIAKE

SEQ ID NO: 204 - protein, 216 aa, Homo sapiens; identical to SEQ ID NO: 201

SEQ ID NO: 205 - protein, 491 aa, Homo sapiens
MKRMVSWSFHKLKTMKHLLLLLLCVFLVKSQGVNDNEEGFFSARGHRPLDKKREEAPSLRPAPPPISGGGYRARPAKAAATQKKVERKAPDAGGCLHADPDLGVLCPTGCQLQEALLQQERPIRNSVDELNNNVEAVSQTSSSSFQYMYLLKDLWQKRQKQVKDNENVVNEYSSELEKHQLYIDETVNSNIPTNLRVLRSILENLRSKIQKLESDVSAQMEYCRTPCTVSCNIPVVSGKECEEIIRKGGETSEMYLIQPDSSVKPYRVYCDMNTENGGWTVIQNRQDGSVDFGRKWDPYKQGFGNVATNTDGKNYCGLPGEYWLGNDKISQLTRMGPTELLIEMEDWKGDKVKAHYGGFTVQNEANKYQISVNKYRGTAGNALMDGASQLMGENRTMTIHNGMFFSTYDRDNDGWLTSDPRKQCSKEDGGGWWYNRCHAANPNGRYYWGGQYTWDMAKHGTDDGVVWMNWKGSWYSMRKMSMKIRPFFPQQ

SEQ ID NO: 206 - protein, 391 aa, Homo sapiens
MKHLLLLLLCVFLVKSQGVNDNEEGFFSARGHRPLDKKREEAPSLRPAPPPISGGGYRARPAKAAATQKKVERKAPDAGGCLHAETVNSNIPTNLRVLRSILENLRSKIQKLESDVSAQMEYCRTPCTVSCNIPVVSGKECEEIIRKGGETSEMYLIQPDSSVKPYRVYCDMNTENGGWTVIQNRQDGSVDFGRKWDPYKQGFGNVATNTDGKNYCGLPGEYWLGNDKISQLTRMGPTELLIEMEDWKGDKVKAHYGGFTVQNEANKYQISVNKYRGTAGNALMDGASQLMGENRTMTIHNGMFFSTYDRDNDGWLTSDPRKQCSKEDGGGWWYNRCHAANPNGRYYWGGQYTWDMAKHGTDDGVVWMNWKGSWYSMRKMSMKIRPFFPQQ

SEQ ID NO: 207 - protein, 512 aa, Homo sapiens [sequence omitted]

SEQ ID NO: 208 - protein, 491 aa, Homo sapiens; identical to SEQ ID NO: 205

SEQ ID NO: 209 - protein, 344 aa, Homo sapiens
MYLLKDLWQKRQKQVKDNENVVNEYSSELEKHQLYIDETVNSNIPTNLRVLRSILENLRSKIQKLESDVSAQMEYCRTPCTVSCNIPVVSGKECEEIIRKGGETSEMYLIQPDSSVKPYRVYCDMNTENGGWTVIQNRQDGSVDFGRKWDPYKQGFGNVATNTDGKNYCGLPGEYWLGNDKISQLTRMGPTELLIEMEDWKGDKVKAHYGGFTVQNEANKYQISVNKYRGTAGNALMDGASQLMGENRTMTIHNGMFFSTYDRDNDGWLTSDPRKQCSKEDGGGWWYNRCHAANPNGRYYWGGQYTWDMAKHGTDDGVVWMNWKGSWYSMRKMSMKIRPFFPQQ

SEQ ID NO: 210 - protein, 257 aa, Homo sapiens [sequence omitted]

SEQ ID NO: 211 - protein, 344 aa, Homo sapiens; identical to SEQ ID NO: 209

SEQ ID NO: 212 - protein, 432 aa, Homo sapiens
MKRMVSWSFHKLKTMKHLLLLLLCVFLVKSQGVNDNEEGFFSARGHRPLDKKREEALLQQERPIRNSVDELNNNVEAVSQTSSSSFQYMYLLKDLWQKRQKQVKDNENVVNEYSSELEKHQLYIDETVNSNIPTNLRVLRSILENLRSKIQKLESDVSAQMEYCRTPCTVSCNIPVVSGKECEEIIRKGGETSEMYLIQPDSSVKPYRVYCDMNTENGGWTVIQNRQDGSVDFGRKWDPYKQGFGNVATNTDGKNYCGLPGEYWLGNDKISQLTRMGPTELLIEMEDWKGDKVKAHYGGFTVQNEANKYQISVNKYRGTAGNALMDGASQLMGENRTMTIHNGMFFSTYDRDNDGWLTSDPRKQCSKEDGGGWWYNRCHAANPNGRYYWGGQYTWDMAKHGTDDGVVWMNWKGSWYSMRKMSMKIRPFFPQQ

SEQ ID NO: 213 - protein, 491 aa, Homo sapiens
MKRMVSWSFHKLKTMKHLLLLLLCVFLVKSQGVNDNEEGFFSARGHRPLDKKREEAPSLRPAPPPISGGGYRARPAKAAATQKKVERKAPDAGGCLHADPDLGVLCPTGCQLQEALLQQERPIRNSVDELNNNVEAVSQTSSSSFQYMYLLKDLWQKRQKQVKDNENVVNEYSSELEKHQLYIDETVNSNIATNLRVLRSILENLRSKIQKLESDVSAQMEYCRTPCTVSCNIPVVSGKECEEIIRKGGETSEMYLIQPDSSVKPYRVYCDMNTENGGWTVIQNRQDGSVDFGRKWDPYKQGFGNVATNTDGKNYCGLPGEYWLGNDKISQLTRMGPTELLIEMEDWKGDKVKAHYGGFTVQNEANKYQISVNKYRGTAGNALMDGASQLMGENRTMTIHNGMFFSTYDRDNDGWLTSDPRKQCSKEDGGGWWYNRCHAANPNGRYYWGGQYTWDMAKHGTDDGVVWMNWKGSWYSMRKMSMKIRPFFPQQ

SEQ ID NO: 214 - protein, 445 aa, Homo sapiens [sequence omitted]

SEQ ID NO: 215 - protein, 457 aa, Homo sapiens
MKHLLLLLLCVFLVKSQGVNDNEEGFFSARGHRPLDKKREEAPSLRPAPPPISGGGYRARPAKAAATQKKLCPTGCQLQEALLQQERPIRNSVDELNNNVEAVSQTSSSSFQYMYLLKDLWQKRQKQVKDNENVVNEYSSELEKHQLYIDETVNSNIPTNLRVLRSILENLRSKIQKLESDVSAQMEYCRTPCTVSCNIPVVSGKECEEIIRKGGETSEMYLIQPDSSVKPYRVYCDMNTENGGWTVIQNRQDGSVDFGRKWDPYKQGFGNVATNTDGKNYCGLPGEYWLGNDKISQLTRMGPTELLIEMEDWKGDKVKAHYGGFTVQNEANKYQISVNKYRGTAGNALMDGASQLMGENRTMTIHNGMFFSTYDRDNDGWLTSDPRKQCSKEDGGGWWYNRCHAANPNGRYYWGGQYTWDMAKHGTDDGVVWMNWKGSWYSMRKMSMKIRPFFPQQ

SEQ ID NO: 216 - protein, 353 aa, Homo sapiens
GLAYVAAAGAAADAERGRPPGTSCGGRSGCGRRRARASERASEPSRASRRRHGPERPDGHGRGLRRPASVPHTPRPRTCLAAAWCSPPQPPHPWVSVALQFLRVTKQYLPHVARLCLISTFLEDGIRMWFQWSEQRDYIDTTWNCGYLLASSFVFLNLLGQLTGCVLVLSRNFVQYACFGLFGIIALQTIAYSILWDLKFLMRNLALGGGLLLLLAESRSEGKSMFAGVPTMRESSPKQYMQLGGRVLLVLMFMTLLHFDASFFSIVQNIVGTALMILVAIGFKTKLAALTLVVWLFAINVYFNAFWTIPVYKPMHDFLKYDFFQTMSVIGGLLLVVALGPGGVSMDEKKKEW

SEQ ID NO: 217 - protein, 269 aa, Homo sapiens
MGQNDLMGTAEDFADQFLRVTKQYLPHVARLCLISTFLEDGIRMWFQWSEQRDYIDTTWNCGYLLASSFVFLNLLGQLTGCVLVLSRNFVQYACFGLFGIIALQTIAYSILWDLKFLMRNLALGGGLLLLLAESRSEGKSMFAGVPTMRESSPKQYMQLGGRVLLVLMFMTLLHFDASFFSIVQNIVGTALMILVAIGFKTKLAALTLVVWLFAINVYFNAFWTIPVYKPMHDFLKYDFFQTMSVIGGLLLVVALGPGGVSMDEKKKEW

SEQ ID NO: 218 - protein, 333 aa, Homo sapiens
MISSDRVRASVHPWPHPAWPLEPQPTRSEAGRRALPVEAAAGAGADGREPASERASRAEPPAVAMGQNDLMGTAEDFADQFLRVTKQYLPHVARLCLISTFLEDGIRMWFQWSEQRDYIDTTWNCGYLLASSFVFLNLLGQLTGCVLVLSRNFVQYACFGLFGIIALQTIAYSILWDLKFLMRNLALGGGLLLLLAESRSEGKSMFAGVPTMRESSPKQYMQLGGRVLLVLMFMTLLHFDASFFSIVQNIVGTALMILVAIGFKTKLAALTLVVWLFAINVYFNAFWTIPVYKPMHDFLKYDFFQTMSVIGGLLLVVALGPGGVSMDEKKKEW

SEQ ID NO: 219 - protein, 269 aa, Homo sapiens; identical to SEQ ID NO: 217

SEQ ID NO: 220 - protein, 290 aa, Homo sapiens
NRRLASVPHTPRPRTCLAAAWCSPPQPPHPWVSVALQFLRVTKQYLPHVARLCLISTFLEDGIRMWFQWSEQRDYIDTTWNCGYLLASSFVFLNLLGQLTGCVLVLSRNFVQYACFGLFGIIALQTIAYSILWDLKFLMRNLALGGGLLLLLAESRSEGKSMFAGVPTMRESSPKQYMQLGGRVLLVLMFMTLLHFDASFFSIVQNIVGTALMILVAIGFKTKLAALTLVVWLFAINVYFNAFWTIPVYKPMHDFLKYDFFQTMSVIGGLLLVVALGPGGVSMDEKKKEW

SEQ ID NO: 221 - protein, 530 aa, Homo sapiens
GHLIVISFSSAFVSLGDCGLPPDVPNAQPALEGRTSFPEDTVITYKCEESFVKIPGEKDSVICLKGSQWSDIEEFCNRSCEVPTRLNSASLKQPYITQNYFPVGTVVEYECRPGYRREPSLSPKLTCLQNLKWSTAVEFCKKKSCPNPGEIRNGQIDVPGGILFGATISFSCNTGYKLFGSTSSFCLISGSSVQWSDPLPECREIYCPAPPQIDNGIIQGERDHYGYRQSVTYACNKGFTMIGEHSIYCTVNNDEGEWSGPPPECRGKSLTSKVPPTVQKPTTVNVPTTEVSPTSQKTTTKTTTPNAQGTETPSVLQKHTTENVSATRTPPTPQKPTTVNVPATIVTPTPQKPTTINVPATGVSSTPQRHTIVNVSATGTLPTLQKPTRANDSATKSPAAAQTSFISKTLSTKTPSAAQNPMMTNASATQATLTAQKFTTAKVAFTQSPSAARKSTNVHSPVTNGLKSTQRFPSAHITATRSTPVSRTTKHFHETTPNKGSGTTSGTTRLLSALIMHMRATKYSMLCLTI

SEQ ID NO: 222 - protein, 381 aa, Homo sapiens
MTVARPSVPAALPLLGELPRLLLLVLLCLPAVWGDCGLPPDVPNAQPALEGRTSFPEDTVITYKCEESFVKIPGEKDSVICLKGSQWSDIEEFCNRSCEVPTRLNSASLKQPYITQNYFPVGTVVEYECRPGYRREPSLSPKLTCLQNLKWSTAVEFCKKKSCPNPGEIRNGQIDVPGGILFGATISFSCNTGYKLFGSTSSFCLISGSSVQWSDPLPECREIYCPAPPQIDNGIIQGERDHYGYRQSVTYACNKGFTMIGEHSIYCTVNNDEGEWSGPPPECRGKSLTSKVPPTVQKPTTVNVPTTEVSPTSQKTTTKTTTPNAQATRSTPVSRTTKHFHETTPNKGSGTTSGTTRLLSGHTCFTLTGLLGTLVTMGLLT

SEQ ID NO: 223 - protein, 381 aa, Homo sapiens; identical to SEQ ID NO: 222

SEQ ID NO: 224 - protein, 321 aa, Homo sapiens
GHLIVISFSSAFVSLGDCGLPPDVPNAQPALEGRTSFPEDTVITYKCEESFVKIPGEKDSVICLKGSQWSDIEEFCNRSCEVPTRLNSASLKQPYITQNYFPVGTVVEYECRPGYRREPSLSPKLTCLQNLKWSTAVEFCKKKSCPNPGEIRNGQIDVPGGILFGATISFSCNTGYKLFGSTSSFCLISGSSVQWSDPLPECREIYCPAPPQIDNGIIQGERDHYGYRQSVTYACNKGFTMIGEHSIYCTVNNDEGEWSGPPPECRATRSTPVSRTTKHFHETTPNKGSGTTSGTTRLLSGHTCFTLTGLLGTLVTMGLLT

SEQ ID NO: 225 - protein, 440 aa, Homo sapiens
MTVARPSVPAALPLLGELPRLLLLVLLCLPAVWGDCGLPPDVPNAQPALEGRTSFPEDTVITYKCEESFVKIPGEKDSVICLKGSQWSDIEEFCNRSCEVPTRLNSASLKQPYITQNYFPVGTVVEYECRPGYRREPSLSPKLTCLQNLKWSTAVEFCKKKSCPNPGEIRNGQIDVPGGILFGATISFSCNTGYKLFGSTSSFCLISGSSVQWSDPLPECREIYCPAPPQIDNGIIQGERDHYGYRQSVTYACNKGFTMIGEHSIYCTVNNDEGEWSGPPPECRGKSLTSKVPPTVQKPTTVNVPTTEVSPTSQKTTTKTTTPNAQATRSTPVSRTTKHFHETTPNKGSGTTSGTTRLLSGSRPVTQAGMRWCDRSSLQSRTPGFKRSFHFSLPSSWYYRAHVFHVDRFAWDASNHGLADLAKEELRRKYTQVYRLFLVS

SEQ ID NO: 226 - protein, 507 aa, Homo sapiens
GHLIVISFSSAFVSLGDCGLPPDVPNAQPALEGRTSFPEDTVITYKCEESFVKIPGEKDSVICLKGSQWSDIEEFCNRSCEVPTRLNSASLKQPYITQNYFPVGTVVEYECRPGYRREPSLSPKLTCLQNLKWSTAVEFCKKKSCPNPGEIRNGQIDVPGGILFGATISFSCNTGYKLFGSTSSFCLISGSSVQWSDPLPECREIYCPAPPQIDNGIIQGERDHYGYRQSVTYACNKGFTMIGEHSIYCTVNNDEGEWSGPPPECRGKSLTSKVPPTVQKPTTVNVPTTEVSPTSQKTTTKTTTPNAQGTETPSVLQKHTTENVSATRTPPTPQKPTTVNVPATIVTPTPQKPTTINVPATGVSSTPQRHTIVNVSATGTLPTLQKPTRANDSATKSPAAAQTSFISKTLSTKTPSAAQNPMMTNASATQATLTAQKFTTAKVAFTQSPSAAPTRSTPVSRTTKHFHETTPNKGSGTTSGTTRLLSGHTCFTLTGLLGTLVTMGLLT

SEQ ID NO: 227 - protein, 381 aa, Homo sapiens
MTVARPSVPAALPLLGELPRLLLLVLLCLPAVWGDCGLPPDVPNAQPALEGRTSFPEDTVITYKCEESFVKIPGEKDSVTCLKGSQWSDIEEFCNRSCEVPTRLNSASLKQPYITQNYFPVGTVVEYECRPGYRREPSLSPKLTCLQNLKWSTAVEFCKKKSCPNPGEIRNGQIDVPGGILFGATISFSCNTGYKLFGSTSSFCLISGSSVQWSDPLPECREIYCPAPPQIDNGIIQGERDHYGYRQSVTYACNKGFTMIGEHSIYCTVNNDEGEWSGPPPECRGKSLTSKVPPTVQKPTTVNVPTTEVSPTSQKTTTKTTTPNAQATRSTPVSRTTKHFHETTPNKGSGTTSGTTRLLSGHTCFTLTGLLGTLVTMGLLT

SEQ ID NO: 228 - protein, 193 aa, Homo sapiens
MTVARPSVPAALPLLGELPRLLLLVLLCLPAVWGDCGLPPDVPNAQPALEGRTSFPEDTVITYKCEESFVKIPGEKDSVICLKGSQWSDIEEFCNRSCEVPTRLNSASLKQPYITQNYFPVGTVVEYECRPGYRREPSLSPKLTCLQNLKWSTAVEFCKKKSCPNPGEIRNGQIDVPGGILFGATISFSCNTG

SEQ ID NO: 229 - protein, 363 aa, Homo sapiens
GHLIVISFSSAFVSLGDCGLPPDVPNAQPALEGRTSFPEDTVITYKCEESFVKIPGEKDSVICLKGSQWSDIEEFCNRSCEVPTRLNSASLKQPYITQNYFPVGTVVEYECRPGYRREPSLSPKLTCLQNLKWSTAVEFCKKKSCPNPGEIRNGQIDVPGGILFGATISFSCNTGYKLFGSTSSFCLISGSSVQWSDPLPECREIYCPAPPQIDNGIIQGERDHYGYRQSVTYACNKGFTMIGEHSIYCTVNNDEGEWSGPPPECRGKSLTSKVPPTVQKPTTVNVPTTEVSPTSQKTTTKTTTPNAQATRSTPVSRTTKHFHETTPNKGSGTTSGTTRLLSGHTCFTLTGLLGTLVTMGLLT

SEQ ID NO: 230 - protein, 376 aa, Homo sapiens
GHLIVISFSSAFVSLGDCGLPPDVPNAQPALEGRTSFPEDTVITYKCEESFVKIPGEKDSVICLKGSQWSDIEEFCNRSCEVPTRLNSASLKQPYITQNYFPVGTVVEYECRPGYRREPSLSPKLTCLQNLKWSTAVEFCKKKSCPNPGEIRNGQIDVPGGILFGATISFSCNTGYKLFGSTSSFCLISGSSVQWSDPLPECREIYCPAPPQIDNGIIQGERDHYGYRQSVTYACNKGFTMIGEHSIYCTVNNDEGEWSGPPPECRGKSLTSKVPPTVQKPTTVNVPTTEVSPTSQKTTTKTTTPNAQATRSTPVSRTTKHFHETTPNKGSGTTSGQLTLFRFTEYGSNVLWWKYELDQDCRIKWSLIYCSQGFSY

SEQ ID NO: 231 - protein, 533 aa, Homo sapiens
GHLIVISFSSAFVSLGDCGLPPDVPNAQPALEGRTSFPEDTVITYKCEESFVKIPGEKDSVICLKGSQWSDIEEFCNRSCEVPTRLNSASLKQPYITQNYFPVGTVVEYECRPGYRREPSLSPKLTCLQNLKWSTAVEFCKKKSCPNPGEIRNGQIDVPGGILFGATISFSCNTGYKLFGSTSSFCLISGSSVQWSDPLPECREIYCPAPPQIDNGIIQGERDHYGYRQSVTYACNKGFTMIGEHSIYCTVNNDEGEWSGPPPECRGKSLTSKVPPTVQKPTTVNVPTTEVSPTSQKTTTKTTTPNAQGTETPSVLQKHTTENVSATRTPPTPQKPTTVNVPATIVTPTPQKPTTINVPATGVSSTPQRHTIVNVSATGTLPTLQKPTRANDSATKSPAAAQTSFISKTLSTKTPSAAQNPMMTNASATQATLTAQKFTTAKVAFTQSPSAARKSTNVHSPVTNGLKSTQRFPSAHITATRSTPVSRTTKHFHETTPNKGSGTTSGTTRLLSGHTCFTLTGLLGTLVTMGLLT

SEQ ID NO: 232 - protein, 673 aa, Homo sapiens
MAKPAQGAKYRGSIHDFPGFDPNQDAEALYTAMKGFGSDKEAILDIITSRSNRQRQEVCQSYKSLYGKDLIADLKYELTGKFERLIVGLMRPPAYCDAKEIKDAISGIGTDEKCLIEILASRTNEQMHQLVAAYKDAYERDLEADIIGDTSGHFQKMLVVLLQGTREEDDVVSEDLVQQDVQDLYEAGELKWGTDEAQFIYILGNRSKQHLRLVFDEYLKTTGKPIEASIRGELSGDFEKLMLAVVKCIRSTPEYFAERLFKAMKGLGTRDNTLIRIMVSRSELDMLDIREIFRTKYEKSLYSMIKNDTSGEYKKTLLKLSGGDDDAAGQFFPEAAQVAYQMWELSAVARVELKGTVRPANDFNPDADAKALRKAMKGLGTDEDTIIDIITHRSNVQRQQIRQTFKSHFGRDLMTDLKSEISGDLARLILGLMMPPAHYDAKQLKKAMEGAGTDEKALIEILATRTNAEIRAINEAYKEDYHKSLEDALSSDTSGHFRRILISLATGHREEGGENLDQAREDAQVAAEILEIADTPSGDKTSLETRFMTILCTRSYPHLRRVFQEFIKMTNYDVEHTIKKEMSGDVRDAFVAIVQSVKNKPLFFADKLYKSMKGAGTDEKTLTRIMVSRSEIDLLNIRREFIEKYDKSLHQAIEGDTSGDFLKALLALCGGED

SEQ ID NO: 233 - protein, 667 aa, Homo sapiens
MAKPAQGAKYRGSIHDFPGFDPNQDAEALYTAMKGFGSDKEAILDIITSRSNRQRQEVCQSYKSLYGKDLIADLKYELTGKFERLIVGLMRPPAYCDAKEIKDAISGIGTDEKCLIEILASRTNEQMHQLVAAYKDAYERDLEADIIGDTSGHFQKMLVVLLQGTREEDDVVSEDLVQQDVQDLYEAGELKWGTDEAQFIYILGNRSKQHLRLVFDEYLKTTGKPIEASIRGELSGDFEKLMLAVVKCIRSTPEYFAERLFKAMKGLGTRDNTLIRIMVSRSELDMLDIREIFRTKYEKSLYSMIKNDTSGEYKKTLLKLSGGDDDAAGQFFPEAAQVAYQMWELSAVARVELKGTVRPANDFNPDADAKALRKAMKGLGTDEDTIIDIITHRSNVQRQQIRQTFKSHFGRDLMTDLKSEISGDLARLILGLMMPPAHYDAKQLKKAMEGAGTDEKALIEILATRTNAEIRAINEAYKEDYHKSLEDALSSDTSGHFRRILISLATGHREEGGENLDQAREDAQEIADTPSGDKTSLETRFMTILCTRSYPHLRRVFQEFIKMTNYDVEHTIKKEMSGDVRDAFVAIVQSVKNKPLFFADKLYKSMKGAGTDEKTLTRIMVSRSEIDLLNIRREFIEKYDKSLHQAIEGDTSGDFLKALLALCGGED

SEQ ID NO: 234 - protein, 667 aa, Homo sapiens
MAKPAQGAKYRGSIHDFPGFDPNQDAEALYTAMKGFGSDKEAILDIITSRSNRQRQEVCQSYKSLYGKDLIADLKYELTGKFERLIVGLMRPPAYCDAKEIKDAISGIGTDEKCLIEILASRTNEQMHQLVAAYKDAYERDLEADIIGDTSGHFQKMLVVLLQGTREEDDVVSEDLVQQDVQDLYEAGELKWGTDEAQFIYILGNRSKQHLRLVFDEYLKTTGKPMKASIRGELSGDFEKLMLAVVKCIRSTPEYFAERLFKAMKGLGTRDNTLIRIMVSRSELDMLDIREIFRTKYEKSLYSMIKNDTSGEYKKTLLKLSGGDDDAAGQFFPEAAQVAYQMWELSAVARVELKGTVRPANDFNPDADAKALRKAMKGLGTDEDTIIDIITHRSNVQRQQIRQTFKSHFGRDLMTDLKSEISGDLARLILGLMMPPAHYDAKQLKKAMEGAGTDEKALIEILATRTNAEIRAINEAYKEDYHKSLEDALSSDTSGHFRRILISLATGHREEGGENLDQAREDAQEIADTPSGDKTSLETRFMTILCTRTYPHLRRVFQEFIKMTNYDVEHTIKKEMSGDVRDAFVAIVQSVKNKPLFFADKLYKSMKGAGTDEKTLTRIMVSRSEIDLLNIRREFIEKYDKSLHQAIEGDTSGDFLKALLALCGGED

SEQ ID NO: 235 - protein, 673 aa, Homo sapiens; identical to SEQ ID NO: 232

SEQ ID NO: 236 - protein, 672 aa, Homo sapiens
AKPAQGAKYRGSIHDFPGFDPNQDAEALYTAMKGFGSDKEAILDIITSRSNRQRQEVCQSYKSLYGKDLIADLKYELTGKFERLIVGLMRPPAYCDAKEIKDAISGIGTDEKCLIEILASRTNEQMHQLVAAYKDAYERDLEADIIGDTSGHFQKMLVVLLQGTREEDDVVSEDLVQQDVQDLYEAGELKWGTDEAQFIYILGNRSKQHLRLVFDEYLKTTGKPIEASIRGELSGDFEKLMLAVVKCIRSTPEYFAERLFKAMKGLGTRDNTLIRIMVSRSELDMLDIREIFRTKYEKSLYSMIKNDTSGEYKKTLLKLSGGDDDAAGQFFPEAAQVAYQMWELSAVARVELKGTVRPANDFNPDADAKALRKAMKGLGTDEDTIIDIITHRSNVQRQQIRQTFKSHFGRDLMTDLKSEISGDLARLILGLMMPPAHYDAKQLKKAMEGAGTDEKALIEILATRTNAEIRAINEAYKEDYHKSLEDALSSDTSGHFRRILISLATGHREEGGENLDQAREDAQVAAEILEIADTPSGDKTSLETRFMTILCTRSYPHLRRVFQEFIKMTNYDVEHTIKKEMSGDVRDAFVAIVQSVKNKPLFFADKLYKSMKGAGTDEKTLTRIMVSRSEIDLLNIRREFIEKYDKSLHQAIEGDTSGDFLKALLALCGGED

SEQ ID NO: 237 - protein, 592 aa, Homo sapiens
MEGKWLLCMLLVLGTAIVEAHDGHDDDVIDIEDDLDDVIEEVEDSKPDTTAPPSSPKVTYKAPVPTGEVYFADSFDRGTLSGWILSKAKKDDTDDEIAKYDGKWEVEEMKESKLPGDKGLVLMSRAKHHAISAKLNKPFLFDTKPLIVQYEVNFQNGIECGGAYVKLLSKTPELNLDQFHDKTPYTIMFGPDKCGEDYKLHFIFRHKNPKTGIYEEKHAKRPDADLKTYFTDKKTHLYTLILNPDNSFEILVDQSVVNSGNLLNDMTPPVNPSREIEDPEDRKPEDWDERPKIPDPEAVKPDDWDEDAPAKIPDEEATKPEGWLDDEPEYVPDPDAEKPEDWDEDMDGEWEAPQIANPRCESAPGCGVWQRPVIDNPNYKGKWKPPMIDNPSYQGIWKPRKIPNPDFFEDLEPFRMTPFSAIGLELWSMTSDIFFDNFIICADRRIVDDWANDGWGLKKAADGAAEPGVVGQMIEAAEERPWLWVVYILTVALPVFLVILFCCSGKKQTSGMEYKKTDAPQPDVKEEEEEKEEEKDKGDEEEEGEEKLEEKQKSDAEEDGGTVSQEEEDRKPKAEEDEILNRSPRNRKPRRE

SEQ ID NO: 238 - protein, 592 aa, Homo sapiens; identical to SEQ ID NO: 237

SEQ ID NO: 239 - protein, 592 aa, Homo sapiens; identical to SEQ ID NO: 237

SEQ ID NO: 240 - protein, 160 aa, Homo sapiens
MQPASAKWYDRRDYVFIEFCVEDSKDVNVNFEKSKLTFSCLGGSDNFKHLNEIDLFHCIDPNDSKHKRTDRSILCCLRKGESGQSWPRLTKERAKLNWLSVDFNNWKDWEDDSDEDMSNFDRFSEMMNNMGGDEDVDLPEVDGADDDSQDSDDEKMPDLE

SEQ ID NO: 241 - protein, 160 aa, Homo sapiens; identical to SEQ ID NO: 240

SEQ ID NO: 242 - protein, 164 aa, Homo sapiens
MFYLRQPASAKWYDRRDYVFIEFCVEDSKDVNVNFEKSKLTFSCLGGSDNFKHLNEIDLFHCIDPNDSKHKRTDRSILCCLRKGESGQSWPRLTKERAKLNWLSVDFNNWKDWEDDSDEDMSNFDRFSEMMNNMGGDEDVDLPEVDGADDDSQDSDDEKMPDLE

SEQ ID NO: 243 - protein, 160 aa, Homo sapiens; identical to SEQ ID NO: 240

SEQ ID NO: 244 - protein, 160 aa, Homo sapiens; identical to SEQ ID NO: 240

SEQ ID NO: 245 - protein, 247 aa, Homo sapiens
MTALPAHRPPAHIQGNQKKETAQGRHRGSRCPCQRPSSHHSACFLGPEIMPLGLLWLGLALLGALHAQAQDSTSDLIPAPPLSKVPLQQNFQDNQFQGKWYVVGLAGNAILREDKDPQKMYATIYELKEDKSYNVTSVLFRKKKCDYWIRTFVPGCQPGEFTLGNIKSYPGLTSYLVRVVSTNYNQHAMVFFKKVSQNREYFKITLYGRTKELTSELKENFIRFSKSLGLPENHIVFPVPIDQCIDG

SEQ ID NO: 246 - protein, 198 aa, Homo sapiens
MPLGLLWLGLALLGALHAQAQDSTSDLIPAPPLSKVPLQQNFQDNQFQGKWYVVGLAGNAILREDKDPQKMYATIYELKEDKSYNVTSVLFRKKKCDYWIRTFVPGCQPGEFTLGNIKSYPGLTSYLVRVVSTNYNQHAMVFFKKVSQNREYFKITLYGRTKELTSELKENFIRFSKSLGLPENHIVFPVPIDQCIDG

SEQ ID NO: 247 - protein, 198 aa, Homo sapiens
MPLGLLWLGLALLGALHAQAQDSTSDLIPAPPLSKVPLQQNFQDNQFQGKWYVVGLAGNAILREDKDPQKMYATIYELKEDKSYNVTSVLFRKKKCDYWIRTFVPGCQPGEFTLGNIKSYPGLTSYLVRVVSTNYNQHAMVFFKKVSQNREYFKITLYGRTKELTSELKENFIRFSKSLGLPENHIVFPVPIGNGQSG

SEQ ID NO: 248 - protein, 198 aa, Homo sapiens
MPLGLLWLGLALLGALHAQAQDSTSDLIPAPPLSKVPLQQNFQDNQFQGKWYVVGLAGNAILREDKDPQKMYATIYELKEDKSYNVTSVLFRKKKCDYWIRTFVPGCQPGEFTLGNIKSYPGLTSYLVRVVSTNYNQHAMVFFKKVSQNREYFKITLYGRTKELTSELKENFIRFSKYLGLPENHIVFPVPIDQCIDG

SEQ ID NO: 249 - protein, 247 aa, Homo sapiens
MTALPAHRPPAHIQGNQKKETAQGRHRGSRCPCQRPSSHHSACFLGPEIMPLGLLWLGLALLGALHAQAQDSTSDLIPAPPLSKVPLQQNFQDNQFQGKWYVVGLAGNAILREDKDPQKMYATIYELKEDKSYNVTSVLFRKKKCDYWIRTFVPGCQPGEFTLGNIKSYPGLTSYLVRVVSTNYNQHAMVFFKKVSQNREYFKITLYGRTKELTSELKENFIRFSKSLGLPENHIVFPVPIGNGQSG

SEQ ID NO: 250 - protein, 198 aa, Homo sapiens; identical to SEQ ID NO: 246

SEQ ID NO: 251 - protein, 531 aa, Homo sapiens
MSKPHSEAGTAFIQTQQLHAAMADTFLEHMCRLDIDSPPITARNTGIICTIGPASRSVETLKEMIKSGMNVARLNFSHGTHEYHAETIKNVRTATESFASDPILYRPVAVALDTKGPEIRTGLIKGSGTAEVELKKGATLKITLDNAYMEKCDENILWLDYKNICKVVEVGSKIYVDDGLISLQVKQKGADFLVTEVENGGSLGSKKGVNLPGAAVDLPAVSEKDIQDLKFGVEQDVDMVFASFIRKASDVHEVRKVLGEKGKNIKIISKIENHEGVRRFDEILEASDGIMVARGDLGIEIPAEKVFLAQKMMIGRCNRAGKPVICATQMLESMIKKPRPTRAEGSDVANAVLDGADCIMLSGETAKGDYPLEAVRMQHLIAREAEAAMFHRKLFEELVRASSHSTDLMEAMAMGSVEASYKCLAAALIVLTESGRSAHQVARYRPRAPIIAVTRNPQTARQAHLYRGIFPVLCKDPVQEAWAEDVDLRVNFAMNVGKARGFFKKGDVVIVLTGWRPGSGFTNTMRVVPVP

SEQ ID NO: 252 - protein, 566 aa, Homo sapiens
MQWSSERGERLLTPGACSSEVPSAVPSRSGGTSAAMSKPHSEAGTAFIQTQQLHAAMADTFLEHMCRLDIDSPPITARNTGIICTIGPASRSVETLKEMIKSGMNVARLNFSHGTHEYHAETIKNVRTATESFASDPILYRPVAVALDTKGPEIRTGLIKGSGTAEVELKKGATLKITLDNAYMEKCDENILWLDYKNICKVVEVGSKIYVDDGLISLQVKQKGADFLVTEVENGGSLGSKKGVNLPGAAVDLPAVSEKDIQDLKFGVEQDVDMVFASFIRKASDVHEVRKVLGEKGKNIKIISKIENHEGVRRFDEILEASDGIMVARGDLGIEIPAEKVFLAQKMMIGRCNRAGKPVICATQMLESMIKKPRPTRAEGSDVANAVLDGADCIMLSGETAKGDYPLEAVRMQHLIAREAEAAMFHRKLFEELVRASSHSTDLMEAMAMGSVEASYKCLAAALIVLTESGRSAHQVARYRPRAPIIAVTRNPQTARQAHLYRGIFPVLCKDPVQEAWAEDVDLRVNFAMNVGKARGFFKKGDVVIVLTGWRPGSGFTNTMRVVPVP

SEQ ID NO: 253 - protein, 531 aa, Homo sapiens
MSKPHSEAGTAFIQTQQLHAAMADTFLEHMCRLDIDSPPITARNTGIICTIGPASRSVETLKEMIKSGMNVARLNFSHGTHEYHAETIKNVRTATESFASDPILYRPVAVALDTKGPEIRTGLIKGSGTAEVELKKGATLKITLDNAYMEKCDENILWLDYKNICKVVEVGSKIYVDDGLISLQVKQKGADFLVTEVENGGSLGSKKGVNLPGAAVDLPAVSEKDIQDLKFGVEQDVDMVFASFIRKASDVHEVRKVLGEKGKNIKIISKIENHEGVRRFDEILEASDGIMVARGDLGIEIPAEKVFLAQKMMIGRCNRAGKPVICATQMLESMIKKPRPTRAEGSDVANAVLDGADCIMLSGETAKGDYPLEAVRMQHLIAREAEAAIYHLQLFEELRRLAPITSDPTEATAVGAVEASFKCCSGAIIVLTKSGRSAHQVARYRPRAPIIAVTRNPQTARQAHLYRGIFPVLCKDPVQEAWAEDVDLRVNFAMNVGKARGFFKKGDVVIVLTGWRPGSGFTNTMRVVPVP

SEQ ID NO: 254 - protein, 552 aa, Homo sapiens
MTQPFNYSAFERIIFAGTSAAMSKPHSEAGTAFIQTQQLHAAMADTFLEHMCRLDIDSPPITARNTGIICTIGPASRSVETLKEMIKSGMNVARLNFSHGTHEYHAETIKNVRTATESFASDPILYRPVAVALDTKGPEIRTGLIKGSGTAEVELKKGATLKITLDNAYMEKCDENILWLDYKNICKVVEVGSKIYVDDGLISLQVKQKGADFLVTEVENGGSLGSKKGVNLPGAAVDLPAVSEKDIQDLKFGVEQDVDMVFASFIRKASDVHEVRKVLGEKGKNIKIISKIENHEGVRRFDEILEASDGIMVARGDLGIEIPAEKVFLAQKMMIGRCNRAGKPVICATQMLESMIKKPRPTRAEGSDVANAVLDGADCIMLSGETAKGDYPLEAVRMQHLIAREAEAAIYHLQLFEELRRLAPITSDPTEATAVGAVEASFKCCSGAIIVLTKSGRSAHQVARYRPRAPIIAVTRNPQTARQAHLYRGIFPVLCKDPVQEAWAEDVDLRVNFAMNVGKARGFFKKGDVVIVLTGWRPGSGFTNTMRVVPVP

SEQ ID NO: 255 - protein, 531 aa, Homo sapiens
MSKPHSEAGTAFIQTQQLHAAMADTFLEHMCRLDIDSPPITARNTGIICTIGPASRSVETLKEMIKSGMNVARLNFSHGTHEYHAETIKNVRTATESFASDPILYRPVAVALDTKGPEIRTGLIKGSGTAEVELKKGATLKITLDNAYMEKCDENILWLDYKNICKVVEVGSKIYVDDGLISLQVKQKGADFLVTEVENGGSLGSKKGVNLPGAAVDLPAVSEKDIQDLKFGVEQDVDMVFASFIRKASDVHEVRKVLGEKGKNIKIISKIENHEGVRRFDEILEASDGIMVARGDLGIEIPAEKVFLAQKMMIGRCNRAGKPVICATQMLESMIKKPRPTRAEGSDVANAVLDGADCIMLSGETAKGDYPLEAVRMQNLIAREAEAAIYHLQLFEELRRLAPITSDPTEATAVGAVEASFKCCSGAIIVLTKSGRSAHQVARYRPRAPIIAVTRNPQTARQAHLYRGIFPVLCKDPVQEAWAEDVDLRVNFAMNVGKARGFFKKGDVVIVLTGWRPGSGFTNTMRVVPVP

SEQ ID NO: 256 - protein, 531 aa, Homo sapiens; identical to SEQ ID NO: 251

SEQ ID NO: 257 - protein, 530 aa, Homo sapiens
SKPHSEAGTAFIQTQQLHAAMADTFLEHMCRLDIDSPPITARNTGIICTIGPASRSVETLKEMIKSGMNVARLNFSHGTHEYHAETIKNVRTATESFASDPILYRPVAVALDTKGPEIRTGLIKGSGTAEVELKKGATLKITLDNAYMEKCDENILWLDYKNICKVVEVGSKIYVDDGLISLQVKQKGADFLVTEVENGGSLGSKKGVNLPGAAVDLPAVSEKDIQDLKFGVEQDVDMVFASFIRKASDVHEVRKVLGEKGKNIKIISKIENHEGVRRFDEILEASDGIMVARGDLGIEIPAEKVFLAQKMMIGRCNRAGKPVICATQMLESMIKKPRPTRAEGSDVANAVLDGADCIMLSGETAKGDYPLEAVRMQNLIAREAEAAIYHLQLFEELRRLAPITSDPTEATAVGAVEASFKCCSGAIIVLTKSGRSAHQVARYRPRAPIIAVTRNPQTARQAHLYRGIFPVLCKDPVQEAWAEDVDLRVNFAMNVGKARGFFKKGDVVIVLTGWRPGSGFTNTMRVVPVP

SEQ ID NO: 258 - protein, 202 aa, Homo sapiens [sequence omitted]

SEQ ID NO: 259 - protein, 530 aa, Homo sapiens
SKPHSEAGTAFIQTQQLHAAMADTFLEHMCRLDIDSPPITARNTGIICTIGPASRSVETLKEMIKSGMNVARLNFSHGTHEYHAETIKNVRTATESFASDPILYRPVAVALDTKGPEIRTGLIKGSGTAEVELKKGATLKITLDNAYMEKCDENILWLDYKNICKVVEVGSKIYVDDGLISLQVKQKGADFLVTEVENGGSLGSKKGVNLPGAAVDLPAVSEKDIQDLKFGVEQDVDMVFASFIRKASDVHEVRKVLGEKGKNIKIISKIENHEGVRRFDEILEASDGIMVARGDLGIEIPAEKVFLAQKMMIGRCNRAGKPVICATQMLESMIKKPRPTRAEGSDVANAVLDGADCIMLSGETAKGDYPLEAVRMQHLIAREAEAAIYHLQLFEELRRLAPITSDPTEATAVGAVEASFKCCSGAIIVLTKSGRSAHQVARYRPRAPIIAVTRNPQTARQAHLYRGIFPVLCKDPVQEAWAEDVDLRVNFAMNVGKARGFFKKGDVVIVLTGWRPGSGFTNTMRVVPVP

SEQ ID NO: 260 - protein, 130 aa, Homo sapiens
MRQRPPSTTCNYLRNSHPLAPITSDPTKATAVGANEASFKCCSGAIIVLTKSGRSAHQVARYRPRAPIIAVTRNPQTASQAHLYRGIFPVLCKDPVQEARAEDVDRWVNLALNVGKARGFFKKGDMWSLC

SEQ ID NO: 261 - protein, 202 aa, Homo sapiens
MLESMIKKPRPTRAEGSDVANAVLDGADCIMLSGETAKGDYPLEAVRMQHLIAREAEAAMFHRKLFEELVRASSHSTDLMEAMAMGSVEASYKCLAAALIVLTESGRSAHQVARYRPRAPIIAVTRNPQTARQAHLYRGIFPVLCKDPVQEAWAEDVDLRVNFAMNVGKARGFFKKGDVVIVLTGWRPGSGFTNTMRVVPVP

SEQ ID NO: 262 - protein, 69 aa, Homo sapiens
AHLYRGIFPVLCKDPVQEAWAEDVDLRVNLAMNVGKAQAFFKKGDVVIVLTGWHPGSGFTNTMCVVPVP

SEQ ID NO: 263 - protein, 32 aa, Homo sapiens
MIVVTWHPQAARQAHLYRGIFPVLCKDPIQEP

SEQ ID NO: 264 - protein, 929 aa, Homo sapiens [sequence omitted]

SEQ ID NO: 265 - protein, 941 aa, Homo sapiens [sequence omitted]

SEQ ID NO: 266 - protein, 948 aa, Homo sapiens [sequence omitted]

SEQ ID NO: 267 - protein, 941 aa, Homo sapiens [sequence omitted]

SEQ ID NO: 268 - protein, 948 aa, Homo sapiens
MVFLPLKWSLAIMSFLLSSLLALLTVSTPSWCQSTEASPKRSDGTPFPWNKIRLPEYVIPVHYDLLIHANLTTLTFWGTTKVEITASQPTSTIILHSHHLQISRATLRKGAGERLSEEPLQVLEHPPQEQIALLAPEPLLVGLPYTVVIHYAGNLSETFHGFYKSTYRTKEGELRILASTQFEPTAARMAFPCFDEPAFKASFSIKIRREPRHLAISNMPLVKSVTVAEGLIEDHFDVTVKMSTYLVAFIISDFESVSKITKSGVKVSVYAVPDKINQADYALDAAVTLLEFYEDYFSIPYPLPKQDLAAIPDFQSGAMENWGLTTYRESALLFDAEKSSASSKLGITVTVAHELAHQWFGNLVTMEWWNDLWLNEGFAKFMEFVSVSVTHPELKVGDYFFGKCFDAMEVDALNSSHPVSTPVENPAQIREMFDDVSYDKGACILNMLREYLSADAFKSGIVQYLQKHSYKNTKNEDLWDSMASICPTDGVKGMDGFCSRSQHSSSSSHWHQEGVDVKTMMNTWTLQRGFPLITITVRGRNVHMKQEHYMKGSDGAPDTGYLWHVPLTFITSKSNMVHRFLLKTKTDVLILPEEVEWIKFNVGMNGYYIVHYEDDGWDSLTGLLKGTHTAVSSNDRASLINNAFQLVSIGKLSIEKALDLSLYLKHETEIMPVFQGLNELIPMYKLMEKRDMNEVETQFKAFLIRLLRDLIDKQTWTDEGSVSEQMLRSELLLLACVHNYQPCVQRAEGYFRKWKESNGNLSLPVDVTLAVFAVGAQSTEGWDFLYSKYQFSLSSTEKSQIEFALCRTQNKEKLQWLLDESFKGDKIKTQEFPQILTLIGRNPVGYPLAWQFLRKNWNKLVQKFELGSSSIAHMVMGTTNQFSTRTRLEEVKGFFSSLKENGSQLRCVQQTIETIEENIGWMDKNFDKIRVWLQSEKLEHDPEADATG

SEQ ID NO: 269 - protein, 371 aa, Homo sapiens
MAAAEAANCIMENFVATLANGMSLQPPLEEVSCGQAESSEKPNAEDMTSKDYYFDSYAHFGIHEEMLKDEVRTLTYRNSMFHNRHLFKDKVVLDVGSGTGILCMFAAKAGARKVIGIECSSISDYAVKIVKANKLDHVVTIIKGKVEEVELPVEKVDIIISEWMGYCLFYESMLNTVLYARDKWLAPDGLIFPDRATLYVTAIEDRQYKDYKIHWWENVYGFDMSCIKDVAIKEPLVDVVDPKQLVTNACLIKEVDIYTVKVEDLTFTSPFCLQVKRNDYVHALVAYFNIEFTRCHKRTGFSTSPESPYTHWKQTVFYMEDYLTVKTGEEIFGTIGMRPNAKNNRDLDFTIDLDFKGQLCELSCSTDYRMR

SEQ ID NO: 270 - protein, 353 aa, Homo sapiens
MAAAEAANCIMEVSCGQAESSEKPNAEDMTSKDYYFDSYAHFGIHEEMLKDEVRTLTYRNSMFHNRHLFKDKVVLDVGSGTGILCMFAAKAGARKVIGIECSSISDYAVKIVKANKLDHVVTIIKGKVEEVELPVEKVDIIISEWMGYCLFYESMLNTVLYARDKWLAPDGLIFPDRATLYVTAIEDRQYKDYKIHWWENVYGFDMSCIKDVAIKEPLVDVVDPKQLVTNACLIKEVDIYTVKVEDLTFTSPFCLQVKRNDYVHALVAYFNIEFTRCHKRTGFSTSPESPYTHWKQTVFYMEDYLTVKTGEEIFGTIGMRPNAKNNRDLDFTIDLDFKGQLCELSCSTDYRMR

SEQ ID NO: 271 - protein, 360 aa, Homo sapiens
MENFVATLANGMSLQPPLEEVSCGQAESSEKPNAEDMTSKDYYFDSYAHFGIHEEMLKDEVRTLTYRNSMFHNRHLFKDKVVLDVGSGTGILCMFAAKAGARKVIGIVCSSISDYAVKIVKANKLDHVVTIIKGKVEEVELPVEKVASSSASGWATASSTSPCSTPCSMPGTSVAPDGLIFPDRATLYVTAIEDRQYKDYKIHWWENVYGFDMSCIKDVAIKEPLVDVVDPKQLVTNACLIKEVDIYTVKVEDLTFTSPFCLQVKRNDYVHALVAYFNIEFTRCHKRTGFSTSPESPYTHWKQTVFYMEDYLTVKTGEEIFGTIGMRPNAKNNRDLDFTIDLDFKGQLCELSCSTDYRMR

SEQ ID NO: 272 - protein, 348 aa, Homo sapiens [sequence omitted]

SEQ ID NO: 273 - protein, 350 aa, Homo sapiens
MSLQPPLEEVSCGQAESSEKPNAEDMTSKDYYFDSYAHFGIHEEMLKDEVRTLTYRNSMFHNRHLFKDKVVLDVGSGTGILCMFAAKAGARKVIGIECSSISDYAVKIVKANKLDHVVTIIKGKVEEVELPVEKVDIIISEWMGYCLFYESMLNTVLYARDKWLAPDGLIFPDRATLYVTAIEDRQYKDYKIHWWENVYGFDMSCIKDVAIKEPLVDVVDPKQLVTNACLIKEVDIYTVKVEDLTFTSPFCLQVKRNDYVHALVAYFNIEFTRCHKRTGFSTSPESPYTHWKQTVFYMEDYLTVKTGEEIFGTIGMRPNAKNNRDLDFTIDLDFKGQLCELSCSTDYRMR

SEQ ID NO: 274 - protein, 207 aa, Homo sapiens
LPLLRVHAQHCALCPDKWLAPNSLIFPERATLYVTATEDRQYKDYKIHWWENVYGFDISCIKDVAIKETLVDVVDLKQLVTNACLIKEVDIYTVKVEDLTFTSPFCLQVKQNDYVHTQVAYFNIEFTHCHKRTGGTGFSTIPESLYTHWKQTVFYMEDYLTLKTGEEIFGTIGMRPNAKNWDRDFTINLDFRGHLCDLSCSTDYRMC

SEQ ID NO: 275 - protein, 361 aa, Homo sapiens
MENFVATLANGMSLQPPLEEVSCGQAESSEKPNAEDMTSKDYYFDSYAHFGIHEEMLKDEVRTLTYRNSMFHNRHLFKDKVVLDVGSGTGILCMFAAKAGARKVIGIVCSSISDYAVKIVKANKLDHVVTIIKGKVEEVELPVEKVDIIISEWMGYCLFYESMLNTVLYARDKWLAPDGLIFPDRATLYVTAIEDRQYKDYKIHWWENVYGFDMSCIKDVAIKEPLVDVVDPKQLVTNACLIKEVDIYTVKVEDLTFTSPFCLQVKRNDYVHALVAYFNIEFTRCHKRTGFSTSPESPYTHWKQTVFYMEDYLTVKTGEEIFGTIGMRPNAKNNRDLDFTIDLDFKGQLCELSCSTDYRMR

SEQ ID NO: 276 - protein, 292 aa, Homo sapiens
MLGAWAVEGTAVALLRLLLLLLPPAIRGPGLGVAGVAGAAGAGLPESVIWAVNAGGEAHVDVHGIHFRKDPLEGRVGRASDYGMKLPILRSNPEDQILYQTERYNEETFGYEVPIKEEGDYVLVLKFAEVYFAQSQQKVFDVRLNGHVVVKDLDIFDRVGHSTAHDEIIPMSIRKGKLSVQGEVSTFTGKLYIEFVKGYYDNPKVCALYIMAGTVDDVPKLQPHPGLEKKEEEEEEEEYDEGSNLKKQTNKNRVQSGPRTPNPYASDNSSLMFPILVAFGVFIPTLFCLCRL

SEQ ID NO: 277 - protein, 292 aa, Homo sapiens; identical to SEQ ID NO: 276

SEQ ID NO: 278 - protein, 363 aa, Homo sapiens
MLGAWAVEGTAVALLRLLLLLLPPAIRGPGLGVAGVAGAAGAGLPESVIWAVNAGGEAHVDVHGIHFRKDPLEGRVGRASDYGMKLPILRSNPEDQILYQTERYNEETFGYEVPIKEEGDYVLVLKFAEVYFAQSQQKVFDVRLNGHVVVKDLDIFDRVGHSTAHDEIIPMSIRKGKLSVQGEVSTFTGKLYIEFVKGYYDNPKVCALYIMAGTVDDVPKLQPHPGLEKKEEEEEEEEYDEGSNLKKQTNKNRVQSGPRTPNPYASDNSSLMFPILVAFGVFIPTLFCLCRLAGWVCFGLSPSVAPEEGETEARQSDSTLKQNRKHPGTVQKSQKKSASLRWKDIINDQRAFSLSVQTKTLCI

SEQ ID NO: 279 - protein, 724 aa, Homo sapiens
MPEEVHHGEEEVETFAFQAEIAQLMSLIINTFYSNKEIFLRELISNASDALDKIRYESLTDPSKLDSGKELKIDIIPNPQERTLTLVDTGIGMTKADLINNLGTIAKSGTKAFMEALQAGADISMIGQFGVGFYSAYLVAEKVVVITKHNDDEQYAWESSAGGSFTVRADHGEPIGRGTKVILHLKEDQTEYLEERRVKEVVKKHSQFIGYPITLYLEKEREKEISDDEAEEEKGEKEEEDKDDEEKPKIEDVGSDEEDDSGKDKKKKTKKIKEKYIDQEELNKTKPIWTRNPDDITQEEYGEFYKSLTNDWEDHLAVKHFSVEGQLEFRALLFIPRRAPFDLFENKKKKNNIKLYVRRVFIMDSCDELIPEYLNFIRGVVDSEDLPLNISREMLQQSKILKVIRKNIVKKCLELFSELAEDKENYKKFYEAFSKNLKLGIHEDSTNRRRLSELLRYHTSQSGDEMTSLSEYVSRMKETQKSIYYITGESKEQVANSAFVERVRKRGFEVVYMTEPIDEYCVQQLKEFDGKSLVSVTKEGLELPEDEEEKKKMEESKAKFENLCKLMKEILDKKVEKVTISNRLVSSPCCIVTSTYGWTANMERIMKAQALRDNSTMGYMMAKKHLEINPDHPIVETLRQKAEADKNDKAVKDLVVLLFETALLSSGFSLEDPQTHSNRIYRMIKLGLGIDEDEVAAEEPNAAVPDEIPPLEGDEDASRMEEVD

SEQ ID NO: 280 - protein, 56 aa, Homo sapiens [sequence omitted]

SEQ ID NO: 281 - protein, 724 aa, Homo sapiens; identical to SEQ ID NO: 279

SEQ ID NO: 282 - protein, 723 aa, Homo sapiens
PEEVHHGEEEVETFAFQAEIAQLMSLIINTFYSNKEIFLRELISNASDALDKIRYESLTDPSKLDSGKELKIDIIPNPQERTLTLVDTGIGMTKADLINNLGTIAKSGTKAFMEALQAGADISMIGQFGVGFYSAYLVAEKVVVITKHNDDEQYAWESSAGGSFTVRADHGEPIGRGTKVILHLKEDQTEYLEERRVKEVVKKHSQFIGYPITLYLEKEREKEISDDEAEEEKGEKEEEDKDDEEKPKIEDVGSDEEDDSGKDKKKKTKKIKEKYIDQEELNKTKPIWTRNPDDITQEEYGEFYKSLTNDWEDHLAVKHFSVEGQLEFRALLFIPRRAPFDLFENKKKKNNIKLYVRRVFIMDSCDELIPEYLNFIRGVVDSEDLPLNISREMLQQSKILKVIRKNIVKKCLELFSELAEDKENYKKFYEAFSKNLKLGIHEDSTNRRRLSELLRYHTSQSGDEMTSLSEYVSRMKETQKSIYYITGESKEQVANSAFVERVRKRGFEVVYMTEPIDEYCVQQLKEFDGKSLVSVTKEGLELPEDEEEKKKMEESKAKFENLCKLMKEILDKKVEKVTISNRLVSSPCCIVTSTYGWTANMERIMKAQALRDNSTMGYMMAKKHLEINPDHPIVETLRQKAEADKNDKAVKDLVVLLFETALLSSGFSLEDPQTHSNRIYRMIKLGLGIDEDEVAAEEPNAAVPDEIPPLEGDEDASRMEEVD

SEQ ID NO: 283 - protein, 20 aa, Homo sapiens
MEESKAKFENLCKLMKKNLR

SEQ ID NO: 284 - protein, 94 aa, Homo sapiens
MRTLAILAAILLVALQAQAEPLQARADEVAAAPEQIAADIPEVVVSLAWDESLAPKHPGSRKNMACYCRIPACIAGERRYGTCIYQGRLWAFCC

SEQ ID NO: 285 - protein, 94 aa, Homo sapiens
MRTLAILAAILLVALQAQAEPLQARADEVAAAPEQIAADIPEVVVSLAWDESLAPKHPGSRKNMDCYCRIPACIAGERRYGTCIYQGRLWAFCC

SEQ ID NO: 286 - protein, 1130 aa, Homo sapiens
MAAAGQLCLLYLSAGLLSRLGAAFNLDTREDNVIRKYGDPGSLFGFSLAMHWQLQPEDKRLLLVGAPRAEALPLQRANRTGGLYSCDITARGPCTRIEFDNDADPTSESKEDQWMGVTVQSQGPGGKVVTCAHRYEKRQHVNTKQESRDIFGRCYVLSQNLRIEDDMDGGDWSFCDGRLRGHEKFGSCQQGVAATFTKDFHYIVFGAPGTYNWKGIVRVEQKNNTFFDMNIFEDGPYEVGGETEHDESLVPVPANSYLGLLFLTSVSYTDPDQFVYKTRPPREQPDTFPDVMMNSYLGFSLDSGKGIVSKDEITFVSGAPRANHSGAVVLLKRDMKSAHLLPEHIFDGEGLASSFGYDVAVVDLNKDGWQDIVIGAPQYFDRDGEVGGAVYVYMNQQGRWNNVKPIRLNGTKDSMFGIAVKNIGDINQDGYPDIAVGAPYDDLGKVFIYHGSANGINTKPTQVLKGISPYFGYSIAGNMDLDRNSYPDVAVGSLSDSVTIFRSRPVINIQKTITVTPNRIDLRQKTACGAPSGICLQVKSCFEYTANPAGYNPSISIVGTLEAEKERRKSGLSSRVQFRNQGSEPKYTQELTLKRQKQKVCMEETLWLQDNIRDKLRPIPITASVEIQEPSSRRRVNSLPEVLPILNSDEPKTAHIDVHFLKEGCGDDNVCNSNLKLEYKFCTREGNQDKFSYLPIQKGVPELVLKDQKDIALEITVTNSPSNPRNPTKDGDDAHEAKLIATFPDTLTYSAYRELRAFPEKQLSCVANQNGSQADCELGNPFKRNSNVTFYLVLSTTEVTFDTPDLDINLKLETTSNQDNLAPITAKAKVVIELLLSVSGVAKPSQVYFGGTVVGEQAMKSEDEVGSLIEYEFRVINLGKPLTNLGTATLNIQWPKEISNGKWLLYLVKVESKGLEKVTCEPQKEINSLNLTESHNSRKKREITEKQIDDNRKFSLFAERKYQTLNCSVNVNCVNIRCPLRGLDSKASLILRSRLWNSTFLEEYSKLNYLDILMRAFIDVTAAAENIRLPNAGTQVRVTVFPSKTVAQYSGVPWWIILVAILAGILMLALLVFILWKCGFFKRSRYDDSVPRYHAVRIRKEEREIKDEKYIDNLEKKQWITKWNENESYS

SEQ ID NO: 287 - protein, 1073 aa, Homo sapiens
MAAAGQLCLLYLSAGLLSRLGAAFNLDTREDNVIRKYGDPGSLFGFSLAMHWQLQPEDKRLLLVGAPRAEALPLQRANRTGGLYSCDITARGPCTRIEFDNDADPTSESKEDQWMGVTVQSQGPGGKVVTCAHRYEKRQHVNTKQESRDIFGRCYVLSQNLRIEDDMDGGDWSFCDGRLRGHEKFGSCQQGVAATFTKDFHYIVFGAPGTYNWKGIVRVEQKNNTFFDMNIFEDGPYEVGGETEHDESLVPVPANSYLGFSLDSGKGIVSKDEITFVSGAPRANHSGAVVLLKRDMKSAHLLPEHIFDGEGLASSFGYDVAVVDLNKDGWQDIVIGAPQYFDRDGEVGGAVYVYMNQQGRWNNVKPIRLNGTKDSMFGIAVKNIGDINQDGYPDIAVGAPYDDLGKVFIYHGSANGINTKPTQVLKGISPYFGYSIAGNMDLDRNSYPDVAVGSLSDSVTIFRSRPVINIQKTITVTPNRIDLRQKTACGAPSGICLQVKSCFEYTANPAGYNPSISIVGTLEAEKERRKSGLSSRVQFRNQGSEPKYTQELTLKRQKQKVCMEETLWLQDNIRDKLRPIPITASVEIQEPSSRRRVNSLPEVLPILNSDEPKTAHIDVHFLKEGCGDDNVCNSNLKLEYKFCTREGNQDKFSYLPIQKGVPELVLKDQKDIALEITVTNSPSNPRNPTKDGDDAHEAKLIATFPDTLTYSAYRELRAFPEKQLSCVANQNGSQADCELGNPFKRNSNVTFYLVLSTTEVTFDTPDLDINLKLETTSNQDNLAPITAKAKVVIELLLSVSGVAKPSQVYFGGTVVGEQAMKSEDEVGSLIEYEFRVINLGKPLTNLGTATLNIQWPKEISNGKWLLYLVKVESKGLEKVTCEPQKEINSLNLTESHNSRKKREITEKQIDDNRKFSLFAERKYQTLNCSVNVNCVNIRCPLRGLDSKASLILRSRLWNSTFLEEYSKLNYLDILMRAFIDVTAAAENIRLPNAGTQVRVTVFPSKTVAQYSGVPWWIILVAILAGILMLALLVFILWKCGFFKRNKKDHYDATYHKAEIHAQPSDKERLTSDA

SEQ ID NO: 288 - protein, 1091 aa, Homo sapiens
MAAAGQLCLLYLSAGLLSRLGAAFNLDTREDNVIRKYGDPGSLFGFSLAMHWQLQPEDKRLLLVGAPRAEALPLQRANRTGGLYSCDITARGPCTRIEFDNDADPTSESKEDQWMGVTVQSQGPGGKVVTCAHRYEKRQHVNTKQESRDIFGRCYVLSQNLRIEDDMDGGDWSFCDGRLRGHEKFGSCQQGVAATFTKDFHYIVFGAPGTYNWKGIVRVEQKNNTFFDMNIFEDGPYEVGGETEHDESLVPVPANSYLGFSLDSGKGIVSKDEITFVSGAPRANHSGAVVLLKRDMKSAHLLPEHIFDGEGLASSFGYDVAVVDLNKDGWQDIVIGAPQYFDRDGEVGGAVYVYMNQQGRWNNVKPIRLNGTKDSMFGIAVKNIGDINQDGYPDIAVGAPYDDLGKVFIYHGSANGINTKPTQVLKGISPYFGYSIAGNMDLDRNSYPDVAVGSLSDSVTIFRSRPVINIQKTITVTPNRIDLRQKTACGAPSGICLQVKSCFEYTANPAGYNPSISIVGTLEAEKERRKSGLSSRVQFRNQGSEPKYTQELTLKRQKQKVCMEETLWLQDNIRDKLRPIPITASVEIQEPSSRRRVNSLPEVLPILNSDEPKTAHIDVHFLKEGCGDDNVCNSNLKLEYKFCTREGNQDKFSYLPIQKGVPELVLKDQKDIALEITVTNSPSNPRNPTKDGDDAHEAKLIATFPDTLTYSAYRELRAFPEKQLSCVANQNGSQADCELGNPFKRNSNVTFYLVLSTTEVTFDTPDLDINLKLETTSNQDNLAPITAKAKVVIELLLSVSGVAKPSQVYFGGTVVGEQAMKSEDEVGSLIEYEFRVINLGKPLTNLGTATLNIQWPKEISNGKWLLYLVKVESKGLEKVTCEPQKEINSLNLTESHNSRKKREITEKQIDDNRKFSLFAERKYQTLNCSVNVNCVNIRCPLRGLDSKASLILRSRLWNSTFLEEYSKLNYLDILMRAFIDVTAAAENIRLPNAGTQVRVTVFPSKTVAQYSGVPWWIILVAILAGILMLALLVFILWKCGFFKRSRYDDSVPRYHAVRIRKEEREIKDEKYIDNLEKKQWITKWNENESYS

SEQ ID NO: 289 - protein, 1130 aa, Homo sapiens
MAAAGQLCLLYLSAGLLSRLGAAFNLDTREDNVIRKYGDPGSLFGFSLAMHWQLQPEDKRLLLVGAPRGEALPLQRANRTGGLYSCDITARGPCTRIEFDNDADPTSESKEDQWMGVTVQSQGPGGKVVTCAHRYEKRQHVNTKQESRDIFGRCYVLSQNLRIEDDMDGGDWSFCDGRLRGHEKFGSCQQGVAATFTKDFHYIVFGAPGTYNWKGIVRVEQKNNTFFDMNIFEDGPYEVGGETEHDESLVPVPANSYLGLLFLTSVSYTDPDQFVYKTRPPREQPDTFPDVMMNSYLGFSLDSGKGIVSKDEITFVSGAPRANHSGAVVLLKRDMKSAHLLPEHIFDGEGLASSFGYDVAVVDLNKDGWQDIVIGAPQYFDRDGEVGGAVYVYMNQQGRWNNVKPIRLNGTKDSMFGIAVKNIGDINQDGYPDIAVGAPYDDLGKVFIYHGSANGINTKPTQVLKGISPYFGYSIAGNMDLDRNSYPDVAVGSLSDSVTIFRSRPVINIQKTITVTPNRIDLRQKTACGAPSGICLQVKSCFEYTANPAGYNPSISIVGTLEAEKERRKSGLSSRVQFRNQGSEPKYTQELTLKRQKQKVCMEETLWLQDNIRDKLRPIPITASVEIQEPSSRRRVNSLPEVLPILNSDEPKTAHIDVHFLKEGCGDDNVCNSNLKLEYKFCTREGNQDKFSYLPIQKGVPELVLKDQKDIALEITVTNSPSNPRNPTKDGDDAHEAKLIATFPDTLTYSAYRELRAFPEKQLSCVANQNGSQADCELGNPFKRNSNVTFYLVLSTTEVTFDTPDLDINLKLETTSNQDNLAPITAKAKVVIELLLSVSGVAKPSQVYFGGTVVGEQAMKSEDEVGSLIEYEFRVINLGKPLTNLGTATLNIQWPKEISNGKWLLYLVKVESKGLEKVTCEPQKEINSLNLTESHNSRKKREITEKQIDDNRKFSLFAERKYQTLNCSVNVNCVNIRCPLRGLDSKASLILRSRLWNSTFLEEYSKLNYLDILMRAFIDVTAAAENIRLPNAGTQVRVTVFPSKTVAQYSGVPWWIILVAILAGILMLALLVFILWKCGFFKRSRYDDSVPRYHAVRIRKEEREIKDEKYIDNLEKKQWITKWNRNESYS

SEQ ID NO: 290 - protein, 1073 aa, Homo sapiens
MAAAGQLCLLYLSAGLLSRLGAAFNLDTREDNVIRKYGDPGSLFGFSLAMHWQLQPEDKRLLLVGAPRGEALPLQRANRTGGLYSCDITARGPCTRIEFDNDADPTSESKEDQWMGVTVQSQGPGGKVVTCAHRYEKRQHVNTKQESRDIFGRCYVLSQNLRIEDDMDGGDWSFCDGRLRGHEKFGSCQQGVAATFTKDFHYIVFGAPGTYNWKGIVRVEQKNNTFFDMNIFEDGPYEVGGETEHDESLVPVPANSYLGFSLDSGKGIVSKDEITFVSGAPRANHSGAVVLLKRDMKSAHLLPEHIFDGEGLASSFGYDVAVVDLNKDGWQDIVIGAPQYFDRDGEVGGAVYVYMNQQGRWNNVKPIRLNGTKDSMFGIAVKNIGDINQDGYPDIAVGAPYDDLGKVFIYHGSANGINTKPTQVLKGISPYFGYSIAGNMDLDRNSYPDVAVGSLSDSVTIFRSRPVINIQKTITVTPNRIDLRQKTACGAPSGICLQVKSCFEYTANPAGYNPSISIVGTLEAEKERRKSGLSSRVQFRNQGSEPKYTQELTLKRQKQKVCMEETLWLQDNIRDKLRPIPITASVEIQEPSSRRRVNSLPEVLPILNSDEPKTAHIDVHFLKEGCGDDNVCNSNLKLEYKFCTREGNQDKFSYLPIQKGVPELVLKDQKDIALEITVTNSPSNPRNPTKDGDDAHEAKLIATFPDTLTYSAYRELRAFPEKQLSCVANQNGSQADCELGNPFKRNSNVTFYLVLSTTEVTFDTPYLDINLKLETTSNQDNLAPITAKAKVVIELLLSVSGVAKPSQVYFGGTVVGEQAMKSEDEVGSLIEYEFRVINLGKPLTNLGTATLNIQWPKEISNGKWLLYLVKVESKGLEKVTCEPQKEINSLNLTESHNSRKKREITEKQIDDNRKFSLFAERKYQTLNCSVNVNCVNIRCPLRGLDSKASLILRSRLWNSTFLEEYSKLNYLDILMRAFIDVTAAAENIRLPNAGTQVRVTVFPSKTVAQYSGVPWWIILVAILAGILMLALLVFILWKCGFFKRNKKDHYDATYHKAEIHAQPSDKERLTSDA

SEQ ID NO: 291 - protein, 1805 aa, Homo sapiens
MAGPRPSPWARLLLAALISVSLSGTLANRCKKAPVKSCTECVRVDKDCAYCTDEMFRDRRCNTQAELLAAGCQRESIVVMESSFQITEETQIDTTLRRSQMSPQGLRVRLRPGEERHFELEVFEPLESPVDLYILMDFSNSMSDDLDNLKKMGQNLARVLSQLTSDYTIGFGKFVDKVSVPQTDMRPEKLKEPWPNSDPPFSFKNVISLTEDVDEFRNKLQGERISGNLDAPEGGFDAILQTAVCTRDIGWRPDSTHLLVFSTESAFHYEADGANVLAGIMSRNDERCHLDTTGTYTQYRTQDYPSVPTLVRLLAKHNIIPIFAVTNYSYSYYEKLHTYFPVSSLGVLQEDSSNIVELLEEAFNRIRSNLDIRALDSPRGLRTEVTSKMFQKTRTGSFHIRRGEVGIYQVQLRALEHVDGTHVCQLPEDQKGNIHLKPSFSDGLKMDAGIICDVCTCELQKEVRSARCSFNGDFVCGQCVCSEGWSGQTCNCSTGSLSDIQPCLREGEDKPCSGRGECQCGHCVCYGEGRYEGQFCEYDNFQCPRTSGFLCNDRGRCSMGQCVCEPGWTGPSCDCPLSNATCIDSNGGICNGRGHCECGRCHCHQQSLYTDTICEINYSAIHPGLCEDLRSCVQCQAWGTGEKKGRTCEECNFKVKMVDELKRAEEVVVRCSFRDEDDDCTYSYTMEGDGAPGPNSTVLVHKKKDCPPGSFWWLIPLLLLLLPLLALLLLLCWKYCACCKACLALLPCCNRGHMVGFKEDHYMLRENLMASDHLDTPMLRSGNLKGRDVVRWKVTNNMQRPGFATHAASINPTELVPYGLSLRLARLCTENLLKPDTRECAQLRQEVEENLNEVYRQISGVHKLQQTKFRQQPNAGKKQDHTIVDTVLMAPRSAKPALLKLTEKQVEQRAFHDLKVAPGYYTLTADQDARGMVEFQEGVELVDVRVPLFIRPEDDDEKQLLVEAIDVPAGTATLGRRLVNITIIKEQARDVVSFEQPEFSVSRGDQVARIPVIRRVLDGGKSQVSYRTQDGTAQGNRDYIPVEGELLFQPGEAWKELQVKLLELQEVDSLLRGRQVRRFHVQLSNPKFGAHLGQPHSTTIIIRDPDELDRSFTSQMLSSQPPPHGDLGAPQNPNAKAAGSRKIHFNWLPPSGKPMGYRVKYWIQGDSESEAHLLDSKVPSVELTNLYPYCDYEMKVCAYGAQGEGPYSSLVSCRTHQEVPSEPGRLAFNVVSSTVTQLSWAEPAETNGEITAYEVCYGLVNDDNRPIGPMKKVLVDNPKNRMLLIENLRESQPYRYTVKARNGAGWGPEREAIINLATQPKRPMSIPIIPDIPIVDAQSGEDYDSFLMYSDDVLRSPSGSQRPSVSDDTEHLVNGRMDFAFPGSTNSLHRMTTTSAAAYGTHLSPHVPHRVLSTSSTLTRDYNSLTRSEHSHSTTLPRDYSTLTSVSSHGLPPIWEHGRSRLPLSWALGSRSRAQMKGFPPSRGPRDSIILAGRPAAPSWGPDSRLTAGVPDTPTRLVFSALGPTSLRVSWQEPRCERPLQGYSVEYQLLNGGELHRLNIPNPAQTSVVVEDLLPNHSYVFRVRAQSQEGWGREREGVITIESQVHPQSPLCPLPGSAFTLSTPSAPGPLVFTALSPDSLQLSWERPRRPNGDIVGYLVTCEMAQGGGPATAFRVDGDSPESRLTVPGLSENVPYKFKVQARTTEGFGPEREGIITIESQDGGPFPQLGSRAGLFQHPLQSEYSSITTTHTSATEPFLVDGLTLGAQHLEAGGSLTRHVTQEFVSRTLTTSGTLSTHMDQQFFQT

SEQ ID NO: 292 - protein, 1702 aa, Homo sapiens
MAGPRPSPWARLLLAALISVSLSGTLANRCKKAPVKSCTECVRVDKDCAYCTDEMFRDRRCNTQAELLAAGCQRESIVVMESSFQITEETQIDTTLRRSQMSPQGLRVRLRPGEERHFELEVFEPLESPVDLYILMDFSNSMSDDLDNLKKMGQNLARVLSQLTSDYTIGFGKFVDKVSVPQTDMRPEKLKEPWPNSDPPFSFKNVISLTEDVDEFRNKLQGERISGNLDAPEGGFDAILQTAVCTRDIGWRPDSTHLLVFSTESAFHYEADGANVLAGIMSRNDERCHLDTTGTYTQYRTQDYPSVPTLVRLLAKHNIIPIFAVTNYSYSYYEKLHTYFPVSSLGVLQEDSSNIVELLEEAFNRIRSNLDIRALDSPRGLRTEVTSKMFQKTRTGSFHIRRGEVGIYQVQLRALEHVDGTHVCQLPEDQKGNIHLKPSFSDGLKMDAGIICDVCTCELQKEVRSARCSFNGDFVCGQCVCSEGWSGQTCNCSTGSLSDIQPCLREGEDKPCSGRGECQCGHCVCYGEGRYEGQFCEYDNFQCPRTSGFLCNDRGRCSMGQCVCEPGWTGPSCDCPLSNATCIDSNGGICNGRGHCECGRCHCHQQSLYTDTICEINYSAIHPGLCEDLRSCVQCQAWGTGEKKGRTCEECNFKVKMVDELKRAEEVVVRCSFRDEDDDCTYSYTMEGDGAPGPNSTVLVHKKKDCPPGSFWWLIPLLLLLLPLLALLLLLCWKYCACCKACLALLPCCNRGHMVGFKEDHYMLRENLMASDHLDTPMLRSGNLKGRDVVRWKVTNNMQRPGFATHAASINPTELVPYGLSLRLARLCTENLLKPDTRECAQLRQEVEENLNEVYRQISGVHKLQQTKFRQQPNAGKKQDHTIVDTVLMAPRSAKPALLKLTEKQVEQRAFHDLKVAPGYYTLTADQDARGMVEFQEGVELVDVRVPLFIRPEDDDEKQLLVEAIDVPAGTATLGRRLVNITIIKEQARDVVSFEQPEFSVSRGDQVARIPVIRRVLDGGKSQVSYRTQDGTAQGNRDYIPVEGELLFQPGEAWKELQVKLLELQEVDSLLRGRQVRRFHVQLSNPKFGAHLGQPHSTTIIIRDPDELDRSFTSQMLSSQPPPHGDLGAPQNPNAKAAGSRKIHFNWLPPSGKPMGYRVKYWIQGDSESEAHLLDSKVPSVELTNLYPYCDYEMKVCAYGAQGEGPYSSLVSCRTHQEVPSEPGRLAFNVVSSTVTQLSWAEPAETNGEITAYEVCYGLVNDDNRPIGPMKKVLVDNPKNRMLLIENLRESQPYRYTVKARNGAGWGPEREAIINLATQPKRPMSIPIIPDIPIVDAQSGEDYDSFLMYSDDVLRSPSGSQRPSVSDDTEHLVNGRMDFAFPGSTNSLHRMTTTSAAAYGTHLSPHVPHRVLSTSSTLTRDYNSLTRSEHSHSTTLPRDYSTLTSVSSHGELHRLNIPNPAQTSVVVEDLLPNHSYVFRVRAQSQEGWGREREGVITIESQVHPQSPLCPLPGSAFTLSTPSAPGPLVFTALSPDSLQLSWERPRRPNGDIVGYLVTCEMAQGGGPATAFRVDGDSPESRLTVPGLSENVPYKFKVQARTTEGFGPEREGIITIESQDGGPFPQLGSRAGLFQHPLQSEYSSITTTHTSATEPFLVDGLTLGAQHLEAGGSLTRHVTQEFVSRTLTTSGTLSTHMDQQFFQT

SEQ ID NO: 293 - protein, 1875 aa, Homo sapiens
MAGPRPSPWARLLLAALISVSLSGTLANRCKKAPVKSCTECVRVDKDCAYCTDEMFRDRRCNTQAELLAAGCQRESIVVMESSFQITEETQIDTTLRRSQMSPQGLRVRLRPGEERHFELEVFEPLESPVDLYILMDFSNSMSDDLDNLKKMGQNLARVLSQLTSDYTIGFGKFVDKVSVPQTDMRPEKLKEPWPNSDPPFSFKNVISLTEDVDEFRNKLQGERISGNLDAPEGGFDAILQTAVCTRDIGWRPDSTHLLVFSTESAFHYEADGANVLAGIMSRNDERCHLDTTGTYTQYRTQDYPSVPTLVRLLAKHNIIPIFAVTNYSYSYYEKLHTYFPVSSLGVLQEDSSNIVELLEEAFNRIRSNLDIRALDSPRGLRTEVTSKMFQKTRTGSFHIRRGEVGIYQVQLRALEHVDGTHVCQLPEDQKGNIHLKPSFSDGLKMDAGIICDVCTCELQKEVRSARCSFNGDFVCGQCVCSEGWSGQTCNCSTGSLSDIQPCLREGEDKPCSGRGECQCGHCVCYGEGRYEGQFCEYDNFQCPRTSGFLCNDRGRCSMGQCVCEPGWTGPSCDCPLSNATCIDSNGGICNGRGHCECGRCHCHQQSLYTDTICEINYSAIHPGLCEDLRSCVQCQAWGTGEKKGRTCEECNFKVKMVDELKRAEEVVVRCSFRDEDDDCTYSYTMEGDGAPGPNSTVLVHKKKDCPPGSFWWLIPLLLLLLPLLALLLLLCWKYCACCKACLALLPCCNRGHMVGFKEDHYMLRENLMASDHLDTPMLRSGNLKGRDVVRWKVTNNMQRPGFATHAASINPTELVPYGLSLRLARLCTENLLKPDTRECAQLRQEVEENLNEVYRQISGVHKLQQTKFRQQPNAGKKQDHTIVDTVLMAPRSAKPALLKLTEKQVEQRAFHDLKVAPGYYTLTADQDARGMVEFQEGVELVDVRVPLFIRPEDDDEKQLLVEAIDVPAGTATLGRRLVNITIIKEQARDVVSFEQPEFSVSRGDQVARIPVIRRVLDGGKSQVSYRTQDGTAQGNRDYIPVEGELLFQPGEAWKELQVKLLELQEVDSLLRGRQVRRFHVQLSNPKFGAHLGQPHSTTIIIRDPDELDRSFTSQMLSSQPPPHGDLGAPQNPNAKAAGSRKIHFNWLPPSGKPMGYRVKYWIQGDSESEAHLLDSKVPSVELTNLYPYCDYEMKVCAYGAQGEGPYSSLVSCRTHQEVPSEPGRLAFNVVSSTVTQLSWAEPAETNGEITAYEVCYGLVNDDNRPIGPMKKVLVDNPKNRMLLIENLRESQPYRYTVKARNGAGWGPEREAIINLATQPKRPMSIPIIPDIPIVDAQSGEDYDSFLMYSDDVLRSPSGSQRPSVSDDTGCGWKFEPLLGEELDLRRVTWRLPPELIPRLSASSGRSSDAEAPHGPPDDGGAGGKGGSLPRSATPGPPGEHLVNGRMDFAFPGSTNSLHRMTTTSAAAYGTHLSPHVPHRVLSTSSTLTRDYNSLTRSEHSHSTTLPRDYSTLTSVSSHGLPPIWEHGRSRLPLSWALGSRSRAQMKGFPPSRGPRDSIILAGRPAAPSWGPDSRLTAGVPDTPTRLVFSALGPTSLRVSWQEPRCERPLQGYSVEYQLLNGGELHRLNIPNPAQTSVVVEDLLPNHSYVFRVRAQSQEGWGREREGVITIESQVHPQSPLCPLPGSAFTLSTPSAPGPLVFTALSPDSLQLSWERPRRPNGDIVGYLVTCEMAQGGGPATAFRVDGDSPESRLTVPGLSENVPYKFKVQARTTEGFGPEREGIITIESQDGGPFPQLGSRAGLFQHPLQSEYSSITTTHTSATEPFLVDGLTLGAQHLEAGGSLTRHVTQEFVSRTLTTSGTLSTHMDQQFFQT

SEQ ID NO: 294 - protein, 1822 aa, Homo sapiens
MAGPRPSPWARLLLAALISVSLSGTLANRCKKAPVKSCTECVRVDKDCAYCTDEMFRDRRCNTQAELLAAGCQRESIVVMESSFQITEETQIDTTLRRSQMSPQGLRVRLRPGEERHFELEVFEPLESPVDLYILMDFSNSMSDDLDNLKKMGQNLARVLSQLTSDYTIGFGKFVDKVSVPQTDMRPEKLKEPWPNSDPPFSFKNVISLTEDVDEFRNKLQGERISGNLDAPEGGFDAILQTAVCTRDIGWRPDSTHLLVFSTESAFHYEADGANVLAGIMSRNDERCHLDTTGTYTQYRTQDYPSVPTLVRLLAKHNIIPIFAVTNYSYSYYEKLHTYFPVSSLGVLQEDSSNIVELLEEAFNRIRSNLDIRALDSPRGLRTEVTSKMFQKTRTGSFHIRRGEVGIYQVQLRALEHVDGTHVCQLPEDQKGNIHLKPSFSDGLKMDAGIICDVCTCELQKEVRSARCSFNGDFVCGQCVCSEGWSGQTCNCSTGSLSDIQPCLREGEDKPCSGRGECQCGHCVCYGEGRYEGQFCEYDNFQCPRTSGFLCNDRGRCSMGQCVCEPGWTGPSCDCPLSNATCIDSNGGICNGRGHCECGRCHCHQQSLYTDTICEINYSAIHPGLCEDLRSCVQCQAWGTGEKKGRTCEECNFKVKMVDELKRAEEVVVRCSFRDEDDDCTYSYTMEGDGAPGPNSTVLVHKKKDCPPGSFWWLIPLLLLLLPLLALLLLLCWKYCACCKACLALLPCCNRGHMVGFKEDHYMLRENLMASDHLDTPMLRSGNLKGRDVVRWKVTNNMQRPGFATHAASINPTELVPYGLSLRLARLCTENLLKPDTRECAQLRQEVEENLNEVYRQISGVHKLQQTKFRQQPNAGKKQDHTIVDTVLMAPRSAKPALLKLTEKQVEQRAFHDLKVAPGYYTLTADQDARGMVEFQEGVELVDVRVPLFIRPEDDDEKQLLVEAIDVPAGTATLGRRLVNITIIKEQARDVVSFEQPEFSVSRGDQVARIPVIRRVLDGGKSQVSYRTQDGTAQGNRDYIPVEGELLFQPGEAWKELQVKLLELQEVDSLLRGRQVRRFHVQLSNPKFGAHLGQPHSTTIIIRDPDELDRSFTSQMLSSQPPPHGDLGAPQNPNAKAAGSRKIHFNWLPPSGKPMGYRVKYWIQGDSESEAHLLDSKVPSVELTNLYPYCDYEMKVCAYGAQGEGPYSSLVSCRTHQEVPSEPGRLAFNVVSSTVTQLSWAEPAETNGEITAYEVCYGLVNDDNRPIGPMKKVLVDNPKNRMLLIENLRESQPYRYTVKARNGAGWGPEREAIINLATQPKRPMSIPIIPDIPIVDAQSGEDYDSFLMYSDDVLRSPSGSQRPSVSDDTGCGWKFEPLLGEELDLRRVTWRLPPELIPRLSASSGRSSDAEAPHGPPDDGGAGGKGGSLPRSATPGPPGEHLVNGRMDFAFPGSTNSLHRMTTTSAAAYGTHLSPHVPHRVLSTSSTLTRDYNSLTRSEHSHSTTLPRDYSTLTSVSSHDSRLTAGVPDTPTRLVFSALGPTSLRVSWQEPRCERPLQGYSVEYQLLNGGELHRLNIPNPAQTSVVVEDLLPNHSYVFRVRAQSQEGWGREREGVITIESQVHPQSPLCPLPGSAFTLSTPSAPGPLVFTALSPDSLQLSWERPRRPNGDIVGYLVTCEMAQGGGPATAFRVDGDSPESRLTVPGLSENVPYKFKVQARTTEGFGPEREGIITIESQDGGPFPQLGSRAGLFQHPLQSEYSSITTTHTSATEPFLVDGLTLGAQHLEAGGSLTRHVTQEFVSRTLTTSGTLSTHMDQQFFQT

SEQ ID NO: 295 - protein, 1822 aa, Homo sapiens
MAGPRPSPWARLLLAALISVSLSGTLANRCKKAPVKSCTECVRVDKDCAYCTDEMFRDRRCNTQAELLAAGCQRESIVVMESSFQITEETQIDTTLRRSQMSPQGLRVRLRPGEERHFELEVFEPLESPVDLYILMDFSNSMSDDLDNLKKMGQNLARVLSQLTSDYTIGFGKFVDKVSVPQTDMRPEKLKEPWPNSDPPFSFKNVISLTEDVDEFRNKLQGERISGNLDAPEGGFDAILQTAVCTRDIGWRPDSTHLLVFSTESAFHYEADGANVLAGIMSRNDERCHLDTTGTYTQYRTQDYPSVPTLVRLLAKHNIIPIFAVTNYSYSYYEKLHTYFPVSSLGVLQEDSSNIVELLEEAFNRIRSNLDIRALDSPRGLRTEVTSKMFQKTRTGSFHIRRGEVGIYQVQLRALEHVDGTHVCQLPEDQKGNIHLKPSFSDGLKMDAGIICDVCTCELQKEVRSARCSFNGDFVCGQCVCSEGWSGQTCNCSTGSLSDIQPCLREGEDKPCSGRGECQCGHCVCYGEGRYEGQFCEYDNFQCPRTSGFLCNDRGRCSMGQCVCEPGWTGPSCDCPLSNATCIDSNGGICNGRGHCECGRCHCHQQSLYTDTICEINYSAIHPGLCEDLRSCVQCQAWGTGEKKGRTCEECNFKVKMVDELKRAEEVVVRCSFRDEDDDCTYSYTMEGDGAPGPNSTVLVHKKKDCPPGSFWWLIPLLLLLLPLLALLLLLCWKYCACCKACLALLPCCNRGHMVGFKEDHYMLRENLMASDHLDTPMLRSGNLKGRDVVRWKVTNNMQRPGFATHAASINPTELVPYGLSLRLARLCTENLLKPDTRECAQLRQEVEENLNEVYRQISGVHKLQQTKFRQQPNAGKKQDHTIVDTVLMAPRSAKPALLKLTEKQVEQRAFHDLKVAPGYYTLTADQDARGMVEFQEGVELVDVRVPLFIRPEDDDEKQLLVEAIDVPAGTATLGRRLVNITIIKEQARDVVSFEQPEFSVSRGDQVARIPVIRRVLDGGKSQVSYRTQDGTAQGNRDYIPVEGELLFQPGEAWKELQVKLLELQEVDSLLRGRQVRRFHVQLSNPKFGAHLGQPHSTTIIIRDPDELDRSFTSQMLSSQPPPHGDLGAPQNPNAKAAGSRKIHFNWLPPSGKPMGYRVKYWIQGDSESEAHLLDSKVPSVELTNLYPYCDYEMKVCAYGAQGEGPYSSLVSCRTHQEVPSEPGRLAFNVVSSTVTQLSWAEPAETNGEITAYEVCYGLVNDDNRPIGPMKKVLVDNPKNRMLLIENLRESQPYRYTVKARNGAGWGPEREAIINLATQPKRPMSIPIIPDIPIVDAQSGEDYDSFLMYSDDVLRSPSGSQRPSVSDDTGCGWKFEPLLGEELDLRRVTWRLPPELIPRLSASSGRSSDAEAPTAPRTTAARAGRAAAVPRSATPGPPGEHLVNGRMDFAFPGSTNSLHRMTTTSAAAYGTHLSPHVPHRVLSTSSTLTRDYNSLTRSEHSHSTTLPRDYSTLTSVSSHDSRLTAGVPDTPTRLVFSALGPTSLRVSWQEPRCERPLQGYSVEYQLLNGGELHRLNIPNPAQTSVVVEDLLPNHSYVFRVRAQSQEGWGREREGVITIESQVHPQSPLCPLPGSAFTLSTPSAPGPLVFTALSPDSLQLSWERPRRPNGDIVGYLVTCEMAQGGGPATAFRVDGDSPESRLTVPGLSENVPYKFKVQARTTEGFGPEREGIITIESQDGGPFPQLGSRAGLFQHPLQSEYSSITTTHTSATEPFLVDGLTLGAQHLEAGGSLTRHVTQEFVSRTLTTSGTLSTHMDQQFFQT

SEQ ID NO: 296 - protein, 734 aa, Homo sapiens
MAGPRPSPWARLLLAALISVSLSGTLANRCKKAPVKSCTECVRVDKDCAYCTDEMFRDRRCNTQAELLAAGCQRESIVVMESSFQITEETQIDTTLRRSQMSPQGLRVRLRPGEERHFELEVFEPLESPVDLYILMDFSNSMSDDLDNLKKMGQNLARVLSQLTSDYTIGFGKFVDKVSVPQTDMRPEKLKEPWPNSDPPFSFKNVISLTEDVDEFRNKLQGERISGNLDAPEGGFDAILQTAVCTRDIGWRPDSTHLLVFSTESAFHYEADGANVLAGIMSRNDERCHLDTTGTYTQYRTQDYPSVPTLVRLLAKHNIIPIFAVTNYSYSYYEKLHTYFPVSSLGVLQEDSSNIVELLEEAFNRIRSNLDIRALDSPRGLRTEVTSKMFQKTRTGSFHIRRGEVGIYQVQLRALEHVDGTHVCQLPEDQKGNIHLKPSFSDGLKMDAGIICDVCTCELQKEVRSARCSFNGDFVCGQCVCSEGWSGQTCNCSTGSLSDIQPCLREGEDKPCSGRGECQCGHCVCYGEGRYEGQFCEYDNFQCPRTSGFLCNDRGRCSMGQCVCEPGWTGPSCDCPLSNATCIDSNGIHPGLCEDLRSCVQCQAWGTGEKKGRTCEECNFKVKMVDELKRAEEVVVRCSFRDEDDDCTYSYTMEGDGAPGPNSTVLVHKKKGTTSPCLLLSRLPSGLLLVAHPPAPPPPAAPGPATAAMLEVLCLLQGLPGTSPVLQPRSHGGL

SEQ ID NO: 297 - protein, 964 aa, Homo sapiens
MAGPRPSPWARLLLAALISVSLSGTLANRCKKAPVKSCTECVRVDKDCAYCTDEMFRDRRCNTQAELLAAGCQRESIVVMESSFQITEETQIDTTLRRSQMSPQGLRVRLRPGEERHFELEVFEPLESPVDLYILMDFSNSMSDDLDNLKKMGQNLARVLSQLTSDYTIGFGKFVDKVSVPQTDMRPEKLKEPWPNSDPPFSFKNVISLTEDVDEFRNKLQGERISGNLDAPEGGFDAILQTAVCTRDIGWRPDSTHLLVFSTESAFHYEADGANVLAGIMSRNDERCHLDTTGTYTQYRTQDYPSVPTLVRLLAKHNIIPIFAVTNYSYSYYEKLHTYFPVSSLGVLQEDSSNIVELLEEAFNRIRSNLDIRALDSPRGLRTEVTSKMFQKTRTGSFHIRRGEVGIYQVQLRALEHVDGTHVCQLPEDQKGNIHLKPSFSDGLKMDAGIICDVCTCELQKEVRSARCSFNGDFVCGQCVCSEGWSGQTCNCSTGSLSDIQPCLREGEDKPCSGRGECQCGHCVCYGEGRYEGQFCEYDNFQCPRTSGFLCNDRGRCSMGQCVCEPGWTGPSCDCPLSNATCIDSNGGICNGRGHCECGRCHCHQQSLYTDTICEINYSAIHPGLCEDLRSCVQCQAWGTGEKKGRTCEECNFKVKMVDELKRAEEVVVRCSFRDEDDDCTYSYTMEGDGAPGPNSTVLVHKKKDCPPGSFWWLIPLLLLLLPLLALLLLLCWKYCACCKACLALLPCCNRGHMVGFKEDHYMLRENLMASDHLDTPMLRSGNLKGRDVVRWKVTNNMQRPGFATHAASINPTELVPYGLSLRLARLCTENLLKPDTRECAQLRQEVEENVRTQELGLAGDVAERGLQADLRCTQAPADQVPAAAQCREKARPHHCGHSADGAPLGQAGPAEAYREAGGTEGLPRPQGGPRLLHPHCRPGRPGHGGVPGGRGAGGRTGAPLYPA

SEQ ID NO: 298 - protein, 1752 aa, Homo sapiens
MAGPRPSPWARLLLAALISVSLSGTLANRCKKAPVKSCTECVRVDKDCAYCTDEMFRDRRCNTQAELLAAGCQRESIVVMESSFQITEETQIDTTLRRSQMSPQGLRVRLRPGEERHFELEVFEPLESPVDLYILMDFSNSMSDDLDNLKKMGQNLARVLSQLTSDYTIGFGKFVDKVSVPQTDMRPEKLKEPWPNSDPPFSFKNVISLTEDVDEFRNKLQGERISGNLDAPEGGFDAILQTAVCTRDIGWRPDSTHLLVFSTESAFHYEADGANVLAGIMSRNDERCHLDTTGTYTQYRTQDYPSVPTLVRLLAKHNIIPIFAVTNYSYSYYEKLHTYFPVSSLGVLQEDSSNIVELLEEAFNRIRSNLDIRALDSPRGLRTEVTSKMFQKTRTGSFHIRRGEVGIYQVQLRALEHVDGTHVCQLPEDQKGNIHLKPSFSDGLKMDAGIICDVCTCELQKEVRSARCSFNGDFVCGQCVCSEGWSGQTCNCSTGSLSDIQPCLREGEDKPCSGRGECQCGHCVCYGEGRYEGQFCEYDNFQCPRTSGFLCNDRGRCSMGQCVCEPGWTGPSCDCPLSNATCIDSNGGICNGRGHCECGRCHCHQQSLYTDTICEINYSAIHPGLCEDLRSCVQCQAWGTGEKKGRTCEECNFKVKMVDELKRAEEVVVRCSFRDEDDDCTYSYTMEGDGAPGPNSTVLVHKKKDCPPGSFWWLIPLLLLLLPLLALLLLLCWKYCACCKACLALLPCCNRGHMVGFKEDHYMLRENLMASDHLDTPMLRSGNLKGRDVVRWKVTNNMQRPGFATHAASINPTELVPYGLSLRLARLCTENLLKPDTRECAQLRQEVEENLNEVYRQISGVHKLQQTKFRQQPNAGKKQDHTIVDTVLMAPRSAKPALLKLTEKQVEQRAFHDLKVAPGYYTLTADQDARGMVEFQEGVELVDVRVPLFIRPEDDDEKQLLVEAIDVPAGTATLGRRLVNITIIKEQARDVVSFEQPEFSVSRGDQVARIPVIRRVLDGGKSQVSYRTQDGTAQGNRDYIPVEGELLFQPGEAWKELQVKLLELQEVDSLLRGRQVRRFHVQLSNPKFGAHLGQPHSTTIIIRDPDELDRSFTSQMLSSQPPPHGDLGAPQNPNAKAAGSRKIHFNWLPPSGKPMGYRVKYWIQGDSESEAHLLDSKVPSVELTNLYPYCDYEMKVCAYGAQGEGPYSSLVSCRTHQEVPSEPGRLAFNVVSSTVTQLSWAEPAETNGEITAYEVCYGLVNDDNRPIGPMKKVLVDNPKNRMLLIENLRESQPYRYTVKARNGAGWGPEREAIINLATQPKRPMSIPIIPDIPIVDAQSGEDYDSFLMYSDDVLRSPSGSQRPSVSDDTEHLVNGRMDFAFPGSTNSLHRMTTTSAAAYGTHLSPHVPHRVLSTSSTLTRDYNSLTRSEHSHSTTLPRDYSTLTSVSSHDSRLTAGVPDTPTRLVFSALGPTSLRVSWQEPRCERPLQGYSVEYQLLNGGELHRLNIPNPAQTSVVVEDLLPNHSYVFRVRAQSQEGWGREREGVITIESQVHPQSPLCPLPGSAFTLSTPSAPGPLVFTALSPDSLQLSWERPRRPNGDIVGYLVTCEMAQGGGPATAFRVDGDSPESRLTVPGLSENVPYKFKVQARTTEGFGPEREGIITIESQDGGPFPQLGSRAGLFQHPLQSEYSSITTTHTSATEPFLVDGLTLGAQHLEAGGSLTRHVTQEFVSRTLTTSGTLSTHMDQQFFQT

SEQ ID NO: 299 - protein, 1875 aa, Homo sapiens; identical to SEQ ID NO: 293

SEQ ID NO: 300 - protein, 1822 aa, Homo sapiens [sequence omitted]

SEQ ID NO: 301 - protein, 1752 aa, Homo sapiens; identical to SEQ ID NO: 298

SEQ ID NO: 302 - protein, 280 aa, Homo sapiens
MAAVVALSLRRRLPATTLGGACLQASRGAQTAAATAPRIKKFAIYRWDPDKAGDKPHMQTYEVDLNKCGPMVLDALIKIKNEVDSTLTFRRSCREGICGSCAMNINGGNTLACTRRIDTNLNKVSKIYPLPHMYVIKDLVPDLSNFYAQYKSIEPYLKKKDESQEGKQQYLQSIEEREKLDGLYECILCACCSTSCPSYWWNGDKYLGPAVLMQAYRWMIDSRDDFTEERLAKLQDPFSLYRCHTIMNCTRTCPKGLNPGKAIAEIKKMMATYKEKKASV

SEQ ID NO: 303 - protein, 223 aa, Homo sapiens
MQTYEVDLNKCGPMVLDALIKIKNEVDSTLTFRRSCREGICGSCAMNINGGNTLACTRRIDTNLNKVSKIYPLPHMYVIKDLVPDLSNFYAQYKSIEPYLKKKDESQEGKQQYLQSIEEREKLDGLYECILCACCSTSCPSYWWNGDKYLGPAVLMQAYRWMIDSRDDFTEERLAKLQDPFSLYRCHTIMNCTRTCPKGLNPGKAIAEIKKMMATYKEKKASV

SEQ ID NO: 304 - protein, 280 aa, Homo sapiens; identical to SEQ ID NO: 302

SEQ ID NO: 305 - protein, 440 aa, Homo sapiens
MALLVLGLVSCTFFLAVNGLYSSSDDVIELTPSNFNREVIQSDSLWLVEFYAPWCGHCQRLTPEWKKAATALKDVVKVGAVDADKHHSLGGQYGVQGFPTIKIFGSNKNRPEDYQGGRTGEAIVDAALSALRQLVKDRLGGRSGGYSSGKQGRSDSSSKKDVIELTDDSFDKNVLDSEDVWMVEFYAPWCGHCKNLEPEWAAAASEVKEQTKGKVKLAAVDATVNQVLASRYGIRGFPTIKIFQKGESPVDYDGGRTRSDIVSRALDLFSDNAPPPELLEIINEDIAKRTCEEHQLCVVAVLPHILDTGAAGRNSYLEVLLKLADKYKKKMWGWLWTEAGAQSELETALGIGGFGYPAMAAINARKMKFALLKGSFSEQGINEFLRELSFGRGSTAPVGGGAFPTIVEREPWDGRDGELPVEDDIDLSDVELDDLGKDEL

SEQ ID NO: 306 - protein, 259 aa, Homo sapiens
MVEFYAPWCGHCKNLEPEWAAAASEVKEQTKGKVKLAAVDATVNQVLASRYGIRGFPTIKIFQKGESPVDYDGGRTRSDIVSRALDLFSDNAPPPELLEIINEDIAKRTCEEHQLCVVAVLPHILDTGAAGRNSYLEVLLKLADKYKKKMWGWLWTEAGAQSELETALGIGGFGYPAMAAINARKMKFALLKGSFSEQGINEFLRELSFGRGSTAPVGGGAFPTIVEREPWDGRDGELPVEDDIDLSDVELDDLGKDEL

SEQ ID NO: 307 - protein, 440 aa, Homo sapiens; identical to SEQ ID NO: 305

SEQ ID NO: 308 - protein, 149 aa, Homo sapiens
METLYRVPFLVLECPNLKLKKPPWLHMPSAMTVYALVVVSYFLITGGIIYDVIVEPPSVGSMTDEHGHQRPVAFLAYRVNGQYIMEGLASSFLFTMGGLGFIILDRSNAPNIPKLNRFLLLFIGFVCVLLSFFMARVFMRMKLPGYLMG

SEQ ID NO: 309 - protein, 149 aa, Homo sapiens; identical to SEQ ID NO: 308

SEQ ID NO: 310 - protein, 149 aa, Homo sapiens; identical to SEQ ID NO: 308

SEQ ID NO: 311 - protein, 495 aa, Homo sapiens
MAGKVRSLLPPLLLAAAGLAGLLLLCVPTRDVREPPALKYGIVLDAGSSHTSMFIYKWPADKENDTGIVGQHSSCDVPGGGISSYADNPSGASQSLVGCLEQALQDVPKERHAGTPLYLGATAGMRLLNLTNPEASTSVLMAVTHTLTQYPFDFRGARILSGQEEGVFGWVTANYLLENFIKYGWVGRWFRPRKGTLGAMDLGGASTQITFETTSPAEDRASEVQLHLYGQHYRVYTHSFLCYGRDQVLQRLLASALQTHGFHPCWPRGFSTQVLLGDVYQSPCTMAQRPQNFNSSARVSLSGSSDPHLCRDLVSGLFSFSSCPFSRCSFNGVFQPPVAGNFVAFSAFFYTVDFLRTSMGLPVATLQQLEAAAVNVCNQTWAQLQARVPGQRARLADYCAGAMFVQQLLSRGYGFDERAFGGVIFQKKAADTAVGWALGYMLNLTNLIPADPPGLRKGTDFSSWVVLLLLFASALLAALVLLLRQVHSAKLPSTI

SEQ ID NO: 312 - protein, 495 aa, Homo sapiens; identical to SEQ ID NO: 311

SEQ ID NO: 313 - protein, 472 aa, Homo sapiens
MAGKVRSLLPPLLLAAAGLAGLLLLCVPTRDVREPPALKYGIVLDAGSSHTSMFIYKWPADKENDTGIVGQHSSCDVPGGGISSYADNPSGASQSLVGCLEQALQDVPKERHAGTPLYLGATAGMRLLNLTNPEASTSVLMAVTHTLTQYPFDFRGARILSGQEEGVFGWVTANYLLENFIKYGWVGRWFRPRKGTLGAMDLGGASTQITFETTSPAEDRASEVQLHLYGQHYRVYTHSFLCYGRDQVLQRLLASALQTHGFHPCWPRGFSTQVLLGDVYQSPCTMAQRPQNFNSSARVSLSGSSDPHLCRDLVSGLFSFSSCPFSRCSFNGVFQPPVAGNFVAFSAFFYTVDFLRTSMGLPVATLQQLEAAAVNVCNQTWAQQLLSRGYGFDERAFGGVIFQKKAADTAVGWALGYMLNLTNLIPADPPGLRKGTDFSSWVVLLLLFASALLAALVLLLRQVHSAKLPSTI

SEQ ID NO: 314 - protein, 242 aa, Homo sapiens
MAETEALSKLREDFRMQNKSVFILGASGETGRVLLKEILEQGLFSKVTLIGRRKLTFDEEAYKNVNQEVVDFEKLDDYASAFQGHDVGFCCLGTTRGKAGAEGFVRVDRDYVLKSAELAKAGGCKHFNLLSSKGADKSSNFLYLQVKGEVEAKVEELKFDRYSVFRPGVLLCDRQESRPGEWLVRKFFGSLPDSWARGHSVPVVTVVRAMLNNVVRPRDKQMELLENKAIHDLGKAHGSLKP

SEQ ID NO: 315 - protein, 242 aa, Homo sapiens; identical to SEQ ID NO: 314

SEQ ID NO: 316 - protein, 276 aa, Homo sapiens [sequence omitted]

SEQ ID NO: 317 - protein, 242 aa, Homo sapiens; identical to SEQ ID NO: 314

SEQ ID NO: 318 - protein, 298 aa, Homo sapiens
MGDHAWSFLKDFLAGGVAAAVSKTAVAPIERVKLLLQVQHASKQISAEKQYKGIIDCVVRIPKEQGFLSFWRGNLANVIRYFPTQALNFAFKDKYKQLFLGGVDRHKQFWRYFAGNLASGGAAGATSLCFVYPLDFARTRLAADVGKGAAQREFHGLGDCIIKIFKSDGLRGLYQGFNVSVQGIIIYRAAYFGVYDTAKGMLPDPKNVHIFVSWMIAQSVTAVAGLVSYPFDTVRRRMMMQSGRKGADIMYTGTVDCWRKIAKDEGAKAFFKGAWSNVLRGMGGAFVLVLYDEIKKYV

SEQ ID NO: 319 - protein, 298 aa, Homo sapiens; identical to SEQ ID NO: 318

SEQ ID NO: 320 - protein, 297 aa, Homo sapiens
MGDHAWSFLKDFLAGAVAAAVSKTAVAPIERVKLLLQVQHASKQISAEKQYKGIIDCVVRIPKEQGFLSFWRGNLANVIRYFPTQALNFAFKDKYKQLFLGGVDRHKQFWRYFAGNLASGGAAGATSLCFVYPLDFARTRLAADVGRRAQREFHGLGDCIIKIFKSDGLRGLYQGFNVSVQGIIIYRAAYFGVYDTAKGMLPDPKNVHIFVSWMIAQSVTAVAGLLSYPFDTVRRRMMMQSGRKGADIMYTGTVDCWRKIAKDEGAKAFFKGAWSNVLRGMGGAFVLVLYDEIKKYV

SEQ ID NO: 321 - protein, 298 aa, Homo sapiens; identical to SEQ ID NO: 318

SEQ ID NO: 322 - protein, 327 aa, Homo sapiens
ASTKGPSVFPLAPCSRSTSESTAALGCLVKDYFPEPVTVSWNSGALTSGVHTFPAVLQSSGLYSLSSVVTVPSSSLGTKTYTCNVDHKPSNTKVDKRVESKYGPPCPSCPAPEFLGGPSVFLFPPKPKDTLMISRTPEVTCVVVDVSQEDPEVQFNWYVDGVEVHNAKTKPREEQFNSTYRVVSVLTVLHQDWLNGKEYKCKVSNKGLPSSIEKTISKAKGQPREPQVYTLPPSQEEMTKNQVSLTCLVKGFYPSDIAVEWESNGQPENNYKTTPPVLDSDGSFFLYSRLTVDKSRWQEGNVFSCSVMHEALHNHYTQKSLSLSLGK

SEQ ID NO: 323 - protein, 541 aa, Homo sapiens [sequence omitted]

SEQ ID NO: 324 - protein, 326 aa, Homo sapiens
ASTKGPSVFPLAPCSRSTSESTAALGCLVKDYFPEPVTVSWNSGALTSGVHTFPAVLQSSGLYSLSSVVTVPSSNFGTQTYTCNVDHKPSNTKVDKTVERKCCVECPPCPAPPVAGPSVFLFPPKPKDTLMISRTPEVTCVVVDVSHEDPEVQFNWYVDGVEVHNAKTKPREEQFNSTFRVVSVLTVVHQDWLNGKEYKCKVSNKGLPAPIEKTISKTKGQPREPQVYTLPPSREEMTKNQVSLTCLVKGFYPSDIAVEWESNGQPENNYKTTPPMLDSDGSFFLYSKLTVDKSRWQQGNVFSCSVMHEALHNHYTQKSLSLSPGK

SEQ ID NO: 325 - protein, 290 aa, Homo sapiens
QMQGVNCTVSSELKTPLGDTTHTCPRCPEPKSCDTPPPCPRCPEPKSCDTPPPCPRCPEPKSCDTPPPCPRCPAPELLGGPSVFLFPPKPKDTLMISRTPEVTCVVVDVSHEDPEVQFKWYVDGVQVHNAKTKPREQQFNSTFRVVSVLTVLHQNWLDGKEYKCKVSNKALPAPIEKTISKTKGQPREPQVYTLPPSREEMTKNQVSLTCLVKGFYPSDIAVEWESSGQPENNYNTTPPMLDSDGSFFLYSKLTVDKSRWQQGNIFSCSVMHEALHNRFTQKSLSLSPGK

SEQ ID NO: 326 - protein, 376 aa, Homo sapiens [sequence omitted]

SEQ ID NO: 327 - protein, 196 aa, Homo sapiens [sequence omitted]

SEQ ID NO: 328 - protein, 360 aa, Homo sapiens
MARAEAKLEALDCADSRQAQSADLAAEPRLLGCRASTKGPSVFPLAPCSRSTSESTAALGCLVKDYFPEPVTVSWNSGALTSGVHTFPAVLQSSGLYSLSSVVTVPSSNFGTQTYTCNVDHKPSNTKVDKTVERKCCVECPPCPAPPVAGPSVFLFPPKPKDTLMISRTPEVTCVVVDVSHEDPEVQFNWYVDGVEVHNAKTKPREEQFNSTFRVVSVLTVVHQDWLNGKEYKCKVSNKGLPAPIEKTISKTKGQPREPQVYTLPPSREEMTKNQVSLTCLVKGFYPSDISVEWESNGQPENNYKTTPPMLDSDGSFFLYSKLTVDKSRWQQGNVFSCSVMHEALHNHYTQKSLSLSPGK

SEQ ID NO: 329 - protein, 330 aa, Homo sapiens [sequence omitted]

SEQ ID NO: 330 - protein, 398 aa, Homo sapiens [sequence omitted]

SEQ ID NO: 331 - protein, 217 aa, Homo sapiens [sequence omitted]

SEQ ID NO: 332 - protein, 215 aa, Homo sapiens [sequence omitted]

SEQ ID NO: 333 - protein, 212 aa, Homo sapiens
VFRRFVEVGRVAYVSFGPHAGKLVAIVDVIDQNRALVDGPCTQVRRQAMPFKCMQLTDFILKFPHSAHQKYVRQAWQKADINTKWAATRWAKKIEARERKAKMTDFDRFKVMKAKKMRNRIIKNEVKKLQKAALLKASPKKAPGTKGTAAAAAAAAKVPAKKITAASKKAPAQKVPAQKATGQKAAPAPKAQKGQKAPAQKAPAPKASGKKA

SEQ ID NO: 334 - protein, 213 aa, Homo sapiens [sequence omitted]

SEQ ID NO: 335 - protein, 168 aa, Homo sapiens [sequence omitted]

SEQ ID NO: 336 - protein, 145 aa, Homo sapiens
MMFKHFLEVCQVAYVSFGPYAGKLVAVVDVTDENRALADGLCTQVMGQAVSFKCMQLTDFILKFPHSTHQRKLRKAALLKASTRKAPAAKVPAKKMITAGKKAPARKIPAQKATGQKAALLQKAQKGQKVLAQGAPSPKVSGKEA

SEQ ID NO: 337 - protein, 339 aa, Homo sapiens
MWQLWASLCCLLVLANARSRPSFHPLSDELVNYVNKRNTTWQAGHNFYNVDMSYLKRLCGTFLGGPKPPQRVMFTEDLKLPASFDAREQWPQCPTIKEIRDQGSCGSCWAFGAVEAISDRICIHTNAHVSVEVSAEDLLTCCGSMCGDGCNGGYPAEAWNFWTRKGLVSGGLYESHVGCRPYSIPPCEHHVNGSRPPCTGEGDTPKCSKICEPGYSPTYKQDKHYGYNSYSVSNSEKDIMAEIYKNGPVEGAFSVYSDFLLYKSGVYQHVTGEMMGGHAIRILGWGVENGTPYWLVANSWNTDWGDNGFFKILRGQDHCGIESEVVAGIPRTDQYWEKI

SEQ ID NO: 338 - protein, 339 aa, Homo sapiens; identical to SEQ ID NO: 337

SEQ ID NO: 339 - protein, 339 aa, Homo sapiens; identical to SEQ ID NO: 337

SEQ ID NO: 340 - protein, 339 aa, Homo sapiens [sequence omitted]

SEQ ID NO: 341 - protein, 339 aa, Homo sapiens; identical to SEQ ID NO: 337

SEQ ID NO: 342 - protein, 339 aa, Homo sapiens; identical to SEQ ID NO: 337

SEQ ID NO: 343 - protein, 339 aa, Homo sapiens; identical to SEQ ID NO: 337

SEQ ID NO: 344 - protein, 339 aa, Homo sapiens; identical to SEQ ID NO: 337

SEQ ID NO: 345 - protein, 339 aa, Homo sapiens; identical to SEQ ID NO: 337

SEQ ID NO: 346 - protein, 72 aa, Homo sapiens
QVPARAGAPGAGPAQVKARLGRRPRLRCTQLPAITSSRPGPRGQVLLYTRRKYSLSNSKLPFITEQAPGSKP

SEQ ID NO: 347 - protein, 72 aa, Homo sapiens; identical to SEQ ID NO: 346

SEQ ID NO: 348 - protein, 72 aa, Homo sapiens; identical to SEQ ID NO: 346

SEQ ID NO: 349 - protein, 72 aa, Homo sapiens; identical to SEQ ID NO: 346

SEQ ID NO: 350 - protein, 72 aa, Homo sapiens; identical to SEQ ID NO: 346

SEQ ID NO: 351 - protein, 1214 aa, Homo sapiens
MAVRKKDGGPNVKYYEAADTVTQFDNVRLWLGKNYKKYIQAEPPTNKSLSSLVVQLLQFQEEVFGKHVSNAPLTKLPIKCFLDFKAGGSLCHILAAAYKFKSDQGWRRYDFQNPSRMDRNVEMFMTIEKSLVQNNCLSRPNIFLCPEIEPKLLGKLKDIIKRHQGTVTEDKNNASHVVYPVPGNLEEEEWVRPVMKRDKQVLLHWGYYPDSYDTWIPASEIEASVEDAPTPEKPRKVHAKWILDTDTFNEWMNEEDYEVNDDKNPVSRRKKISAKTLTDEVNSPDSDRRDKKGGNYKKRKRSPSPSPTPEAKKKNAKKGPSTPYTKSKRGHREEEQEDLTKDMDEPSPVPNVEEVTLPKTVNTKKDSESAPVKGGTMTDLDEQEDESMETTGKDEDENSTGNKGEQTKNPDLHEDNVTEQTHHIIIPSYAAWFDYNSVHAIERRALPEFFNGKNKSKTPEIYLAYRNFMIDTYRLNPQEYLTSTACRRNLAGDVCAIMRVHAFLEQWGLINYQVDAESRPTPMGPPPTSHFHVLADTPSGLVPLQPKTPQQTSASQQMLNFPDKGKEKPTDMQNFGLRTDMYTKKNVPSKSKAAASATREWTEQETLLLLEALEMYKDDWNKVSEHVGSRTQDECILHFLRLPIEDPYLEDSEASLGPLAYQPIPFSQSGNPVMSTVAFLASVVDPRVASAAAKSALEEFSKMKEEVPTALVEAHVRKVEEAAKVTGKADPAFGLESSGIAGTTSDEPERIEESGNDEARVEGQATDEKKEPKEPREGGGAIEEEAKEKTSEAPKKDEEKGKEGDSEKESEKSDGDPIVDPEKEKEPKEGQEEVLKEVVESEGERKTKVERDIGEGNLSTAAAAALAAAAVKAKHLAAVEERKIKSLVALLVETQMKKLEIKLRHFEELETIMDREREALEYQRQQLLADRQAFHMEQLKYAEMRARQQHFQQMHQQQQQPPPALPPGSQPIPPTGAAGPPAVHGLAVAPASVVPAPAGSGAPPGSLGPSEQIGQAGSTAGPQQQQPAGAPQPGAVPPGVPPPGPHGPSPFPNQQTPPSMMPGAVPGSGHPGVAGNAPLGLPFGMPPPPPPPAPSIIPFGSLADSISINLPAPPNLHGHHHHLPFAPGTLPPPNLPVSMANPLHPNLPATTTMPSSLPLGPGLGSAAAQSPAIVAAVQGNLLPSASPLPDPGTPLPPDPTAPSPGTVTPVPPPQ

SEQ ID NO: 352 - protein, 1105 aa, Homo sapiens
MAAAAGGGGPGTAVGATGSGIAAAAAGLAVYRRKDGGPATKFWESPETVSQLDSVRVWLGKHYKKYVHADAPTNKTLAGLVVQLLQFQEDAFGKHVTNPAFTKLPAKCFMDFKAGGALCHILGAAYKYKNEQGWRRFDLQNPSRMDRNVEMFMNIEKTLVQNNCLTRPNIYLIPDIDLKLANKLKDIIKRHQGTFTDEKSKASHHIYPYSSSQDDEEWLRPVMRKEKQVLVHWGFYPDSYDTWVHSNDVDAEIEDPPIPEKPWKVHVKWILDTDIFNEWMNEEDYEVDENRKPVSFRQRISTKNEEPVRSPERRDRKASANARKRKHSPSPPPPTPTESRKKSGKKGQASLYGKRRSQKEEDEQEDLTKDMEDPTPVPNIEEVVLPKNVNLKKDSENTPVKGGTVADLDEQDEETVTAGGKEDEDPAKGDQSRSVDLGEDNVTEQTNHIIIPSYASWFDYNCIHVIERRALPEFFNGKNKSKTPEIYLAYRNFMIDTYRLNPQEYLTSTACRRNLTGDVCAVMRVHAGGEQWGLVNYQVDPESRPMAMGPPPTPHFNVLADTPSGLVPLHLRSPQVPAAQQMLNFPEKNKEKPVDLQNFGLRTDIYSKKTLAKSKGASAGREWTEQETLLLLEALEMYKDDWNKVSEHVGSRTQDECILHFLRLPIEDPYLENSDASLGPLAYQPVPFSQSGNPVMSTVAFLASVVDPRVASAAAKAALEEFSRVREEVPLELVEAHVKKVQEAARASGKVDPTYGLESSCIAGTGPDEPEKLEGAEEEKMEADPDGQQPEKAENKVENETDEGDKAQDGENEKNSEKEQDSEVSEDTKSEEKETEENKELTDTCKERESDTGKKKVEHEISEGNVATAAAAALASAATKAKHLAAVEERKIKSLVALLVETQMKKLEIKLRHFEELETIMDREKEALEQQRQQLLTERQNFHMEQLKYAELRARQQMEQQQHGQNPQQAHQHSGGPGLAPLGAAGHPGMMPHQQPPPYPLMHHQMPPPHPPQPGQIPGPGSMMPGQHMPGRMIPTVAANIHPSGSGPTPPGMPPMPGNILGPRVPLTAPNGMYPPPPQQQPPPPPPADGVPPPPAPGPPASAAP

SEQ ID NO: 353 - protein, 883 aa, Homo sapiens
MRKEKQVLVHWGFYPDSYDTWVHSNDVDAEIEDPPIPEKPWKVHVKWILDTDIFNEWMNEEDYEVDENRKPVSFRQRISTKNEEPVRSPERRDRKASANARKRKHSPSPPPPTPTESRKKSGKKGQASLYGKRRSQKEEDEQEDLTKDMEDPTPVPNIEEVVLPKNVNLKKDSENTPVKGGTVADLDEQDEETVTAGGKEDEDPAKGDQSRSVDLGEDNVTEQTNHIIIPSYASWFDYNCIHVIERRALPEFFNGKNKSKTPEIYLAYRNFMIDTYRLNPQEYLTSTACRRNLTGDVCAVMRVHAFLEQWGLVNYQVDPESRPMAMGPPPTPHFNVLADTPSGLVPLHLRSPQVPAAQQMLNFPEKNKEKPVDLQNFGLRTDIYSKKTLAKSKGASAGREWTEQETLLLLEALEMYKDDWNKVSEHVGSRTQDECILHFLRLPIEDPYLENSDASLGPLAYQPVPFSQSGNPVMSTVAFLASVVDPRVASAAAKAALEEFSRVREEVPLELVEAHVKKVQEAARASGKVDPTYGLESSCIAGTGPDEPEKLEGAEEEKMEADPDGQQPEKAENKVENETDEGDKAQDGENEKNSEKEQDSEVSEDTKSEEKETEENKELTDTCKERESDTGKKKVEHEISEGNVATAAAAALASAATKAKHLAAVEERKIKSLVALLVETQMKKLEIKLRHFEELETIMDREKEALEQQRQQLLTERQNFHMEQLKYAELRARQQMEQQQHGQNPQQAHQHSGGPGLAPLGAAGHPGMMPHQQPPPYPLMHHQMPPPHPPQPGQIPGPGSMMPGQHMPGRMIPTVAANIHPSGSGPTPPGMPPMPGNILGPRVPLTAPNGMYPPPPQQQPPPPPPADGVPPPPAPGPPASAAP

SEQ ID NO: 354 - protein, 767 aa, Homo sapiens [sequence omitted]

SEQ ID NO: 355 - protein, 1214 aa, Homo sapiens; identical to SEQ ID NO: 351

SEQ ID NO: 356 - protein, 1130 aa, Homo sapiens
MAVRKKDGGPNVKYYEAADTVTQFDNVRLWLGKNYKKYIQAEPPTNKSLSSLVVQLLQFQEEVFGKHVSNAPLTKLPIKCFLDFKAGGSLCHILAAAYKFKSDQGWRRYDFQNPSRMDRNVEMFMTIEKSLVQNNCLSRPNIFLCPEIEPKLLGKLKDIIKRHQGTVTEDKNNASHVVYPVPGNLEEEEWVRPVMKRDKQVLLHWGYYPDSYDTWIPASEIEASVEDAPTPEKPRKVHAKWILDTDTFNEWMNEEDYEVNDDKNPVSRRKKISAKTLTDEVNSPDSDRRDKKGGNYKKRKRSPSPSPTPEAKKKNAKKGPSTPYTKSKRGHREEEQEDLTKDMDEPSPVPNVEEVTLPKTVNTKKDSESAPVKGGTMTDLDEQEDESMETTGKDEDENSTGNKGEQTKNPDLHEDNVTEQTHHIIIPSYAAWFDYNSVHAIERRALPEFFNGKNKSKTPEIYLAYRNFMIDTYRLNPQEYLTSTACRRNLAGDVCAIMRVHAFLEQWGLINYQVDAESRPTPMGPPPTSHFHVLADTPSGLVPLQPKTPQGRQVDADTKAGRKGKELDDLVPETAKGKPELQTSASQQMLNFPDKGKEKPTDMQNFGLRTDMYTKKNVPSKSKAAASATREWTEQETLLLLEALEMYKDDWNKVSEHVGSRTQDECILHFLRLPIEDPYLEDSEASLGPLAYQPIPFSQSGNPVMSTVAFLASVVDPRVASAAAKSALEEFSKMKEEVPTALVEAHVRKVEEAAKVTGKADPAFGLESSGIAGTTSDEPERIEESGNDEARVEGQATDEKKEPKEPREGGGAIEEEAKEKTSEAPKKDEEKGKEGDSEKESEKSDGDPIVDPEKEKEPKEGQEEVLKEVVESEGERKTKVERDIGEGNLSTAAAAALAAAAVKAKHLAAVEERKIKSLVALLVETQMKKLEIKLRHFEELETIMDREREALEYQRQQLLADRQAFHMEQLKYAEMRARQQHFQQMHQQQQQPPPALPPGSQPIPPTGAAGPPAVHGLAVAPASVVPAPAGSGAPPGSLGPSEQIGQAGSTAGPQQQQPAGAPQPGAVPPGVPPPGPHGPSPFPNQQTPPSMMPGAVPGSGHPGVADPGTPLPPDPTAPSPGTVTPVPPPQ

SEQ ID NO: 357 - protein, 1130 aa, Homo sapiens; identical to SEQ ID NO: 356

SEQ ID NO: 358 - protein, 288 aa, Homo sapiens [sequence omitted]

SEQ ID NO: 359 - protein, 287 aa, Homo sapiens
AEKRHTRDSEAQRLPDSFKDSPSKGLGPCGWILVAFSFLFTVITFPISIWMCIKIIKEYERAIIFRLGRILQGGAKGPGLFFILPCTDSFIKVDMRTISFDIPPQEILTKDSVTISVDGVVYYRVQNATLAVANITNADSATRLLAQTTLRNVLGTKNLSQILSDREEIAHNMQSTLDDATDAWGIKVERVEIKDVKLPVQLQRAMAAEAEASREARAKVIAAEGEMNASRALKEASMVITESPAALQLRYLQTLTTIAAEKNSTIVFPLPIDMLQGIIGAKHSHLG

SEQ ID NO: 360 - protein, 288 aa, Homo sapiens [sequence omitted]

SEQ ID NO: 361 - protein, 286 aa, Homo sapiens
MAEKRHTRDSEAQRLPDSDSPSKGLGPCGWILVAFSFLFTVITFPISIWMCIKIIKEYERAIIFRLGRILQGGAKGPGLFFILPCTDSFIKVDMRTISFDIPPQEILTKDSVTISVDGVVYYRVQNATLAVANITNADSATRLLAQTTLRNVLGTKNLSQILSDREEIAHNMQSTLDDATDAWGIKVERVEIKDVKLPVQLQRAMAAEAEASREARAKVIAAEGEMNASRALKEASMVITESPAALQLRYLQTLTTIAAEKNSTIVFPLPIDMLQGIIGAKHSHLG

SEQ ID NO: 362 - protein, 237 aa, Homo sapiens
MCIKIIKEYERAIIFRLGRILQGGAKGPGLFFILPCTDSFIKVDMRTISFDIPPQEILTKDSVTISVDGVVYYRVQNATLAVANITNADSATRLLAQTTLRNVLGTKNLSQILSDREEIAHNMQSTLDDATDAWGIKVERVEIKDVKLPVQLQRAMAAEAEASREARAKVIAAEGEMNASRALKEASMVITESPAALQLRYLQTLTTIAAEKNSTIVFPLPIDMLQGIIGAKHSHLG

SEQ ID NO: 363 - protein, 505 aa, Homo sapiens
MRLRRLALFPGVALLLAAARLAAASDVLELTDDNFESRISDTGSAGLMLVEFFAPWCGHCKRLAPEYEAAATRLKGIVPLAKVDCTANTNTCNKYGVSGYPTLKIFRDGEEAGAYDGPRTADGIVSHLKKQAGPASVPLRTEEEFKKFISDKDASIVGFFDDSFSEAHSEFLKAASNLRDNYRFAHTNVESLVNEYDDNGEGIILFRPSHLTNKFEDKTVAYTEQKMTSGKIKKFIQENIFGICPHMTEDNKDLIQGKDLLIAYYDVDYEKNAKGSNYWRNRVMMVAKKFLDAGHKLNFAVASRKTFSHELSDFGLESTAGEIPVVAIRTAKGEKFVMQEEFSRDGKALERFLQDYFDGNLKRYLKSEPIPESNDGPVKVVVAENFDEIVNNENKDVLIEFYAPWCGHCKNLEPKYKELGEKLSKDPNIVIAKMDATANDVPSPYEVRGFPTIYFSPANKKLNPKKYEGGRELSDFISYLQREATNPPVIQEEKPKKKKKAQEDL

SEQ ID NO: 364 - protein, 461 aa, Homo sapiens
MCLRRPALFPGVALLLAAARLAAASDVLGLRDDNLESRISDTGSAGLMLVEFFAPWCGHCKRLAPEYEAAATRLKGIVPLAKADCTANTNTCNKYGVSGYPTLNMFRDGEEAGAYDGPRTADGIVSHLKKQAGPASVPLRTEEEFKKFISDKDASIVGFFDDSFSEAHSEFLKAASNLRDNYRFAHTNVESLVNEYDDNGDGIILFRPSHLTNKLEDKTVAYTVQKMTSGKIKKFIQENIFGICPHMTEDNKDLIQGKDLLIAYYDVDYEKNAKGSNYWRNRVMMVAKKFLDAGHKLNFAVASRKTFSHELSDFGLESTAGEIPVVAIRTAKGEKFVMQEDFSRDGNALERFLQDYFDGNLKRYLKSEPIPESNDGPVKVVVAENFDEIVNNENKDVLIEFYAPWCGHCKNLEPKYKELGEKLSKDLNIVIAKMDATANDVPSPYEVRVFLPYTSLQPTRS

SEQ ID NO: 365 - protein, 505 aa, Homo sapiens; identical to SEQ ID NO: 363

SEQ ID NO: 366 - protein, 50 aa, Homo sapiens
WPEPGPLPDLQPPERSQPPPARGGLGGPRTGGSCEGAISWPKSWAAVVKI

SEQ ID NO: 367 - protein, 777 aa, Homo sapiens
MGVPFFSSLRCMVDLGPCWAGGLTAEMKLLLALAGLLAILATPQPSEGAAPAVLGEVDTSLVLSSMEEAKQLVDKAYKERRESIKQRLRSGSASPMELLSYFKQPVAATRTAVRAADYLHVALDLLERKLRSLWRRPFNVTDVLTPAQLNVLSKSSGCAYQDVGVTCPEQDKYRTITGMCNNRCGWLGVAAGTGLREASRTPQASRCQRPVLPCRRSPTLGASNRAFVRWLPAEYEDGFSLPYGWTPGVKRNGFPVALARAVSNEIVRFPTDQLTPDQERSLMFMQWGQLLDHDLDFTPEPAARASFVTGVNCETSCVQQPPCFPLKIPPNDPRIKNQADCIPFFRSCPACPGSNITIRNQINALTSFVDASMVYGSEEPLARNLRNMSNQLGLLAVNQRFQDNGRALLPFDNLHDDPCLLTNRSARIPCFLAGDTRSSEMPELTSMHTLLLREHNRLATELKSLNPRWDGERLYQEARKIVGAMVQIITYRDYLPLVLGPTAMRKYLPTYRSYNDSVDPRIANVFTNAFRYGHTLIQPFMFRLDNRYQPMEPNPRVPLSRVFFASWRVVLEGGIDPILRGLMATPAKLNRQNQIAVDEIRERLFEQVMRIGLDLPALNMQRSRDHGLPGYNAWRRFCGLPQPETVGQLGTVLRNLKLARKLMEQYGTPNNIDIWMGGVSEPLKRKGRVGPLLACIIGTQFRKLRDGDRFWWENEGVFSMQQRQALAQISLPRIICDNTGITTVSKNNIFMSNSYPRDFVNCSTLPALNLASWREAS

SEQ ID NO: 368 - protein, 75 aa, Homo sapiens
MVIGEEGFWWENEGVFSMQQRQALAQISLPRIICDNTGITTVSKNNIFMSNSYPRDFVNCSTLPALNLASWREAS

SEQ ID NO: 369 - protein, 792 aa, Homo sapiens
MGVPFFSSLRCMVDLGPCWAGGLTAEMKLLLALAGLLAILATPQPSEGAAPAVLGEVDTSLVLSSMEEAKQLVDKAYKERRERWGTRHCPALGKDVPGLSEKQQAAGSLKVGEGDYGDPCGLPFCLSVPVIKQRLRSGSASPMELLSYFKQPVAATRTAVRAADYLHVALDLLERKLRSLWRRPFNVTDVLTPAQLNVLSKSSGCAYQDVGVTCPEQDKYRTITGMCNNRRSPTLGASNRAFVRWLPAEYEDGFSLPYGWTPGVKRNGFPVALARAVSNEIVRFPTDQLTPDQERSLMFMQWGQLLDHDLDFTPEPAARASFVTGVNCETSCVQQPPCFPLKIPPNDPRIKNQADCIPFFRSCPACPGSNITIRNQINALTSFVDASMVYGSEEPLARNLRNMSNQLGLLAVNQRFQDNGRALLPFDNLHDDPCLLTNRSARIPCFLAGDTRSSEMPELTSMHTLLLREHNRLATELKSLNPRWDGERLYQEARKIVGAMVQIITYRDYLPLVLGPTAMRKYLPTYRSYNDSVDPRIANVFTNAFRYGHTLIQPFMFRLDNRYQPMEPNPRVPLSRVFFASWRVVLEGGIDPILRGLMATPAKLNRQNQIAVDEIRERLFEQVMRIGLDLPALNMQRSRDHGLPGYNAWRRFCGLPQPETVGQLGTVLRNLKLARKLMEQYGTPNNIDIWMGGVSEPLKRKGRVGPLLACIIGTQFRKLRDGDRFWWENEGVFSMQQRQALAQISLPRIICDNTGITTVSKNNIFMSNSYPRDFVNCSTLPALNLASWREAS

SEQ ID NO: 370 - protein, 745 aa, Homo sapiens
MGVPFFSSLRCMVDLGPCWAGGLTAEMKLLLALAGLLAILATPQPSEGAAPAVLGEVDTSLVLSSMEEAKQLVDKAYKERRESIKQRLRSGSASPMELLSYFKQPVAATRTAVRAADYLHVALDLLERKLRSLWRRPFNVTDVLTPAQLNVLSKSSGCAYQDVGVTCPEQDKYRTITGMCNNRRSPTLGASNRAFVRWLPAEYEDGFSLPYGWTPGVKRNGFPVALARAVSNEIVRFPTDQLTPDQERSLMFMQWGQLLDHDLDFTPEPAARASFVTGVNCETSCVQQPPCFPLKIPPNDPRIKNQADCIPFFRSCPACPGSNITIRNQINALTSFVDASMVYGSEEPLARNLRNMSNQLGLLAVNQRFQDNGRALLPFDNLHDDPCLLTNRSARIPCFLAGDTRSSEMPELTSMHTLLLREHNRLATELKSLNPRWDGERLYQEARKIVGAMVQIITYRDYLPLVLGPTAMRKYLPTYRSYNDSVDPRIANVFTNAFRYGHTLIQPFMFRLDNRYQPMEPNPRVPLSRVFFASWRVVLEGGIDPILRGLMATPAKLNRQNQIAVDEIRERLFEQVMRIGLDLPALNMQRSRDHGLPGYNAWRRFCGLPQPETVGQLGTVLRNLKLARKLMEQYGTPNNIDIWMGGVSEPLKRKGRVGPLLACIIGTQFRKLRDGDRFWWENEGVFSMQQRQALAQISLPRIICDNTGITTVSKNNIFMSNSYPRDFVNCSTLPALNLASWREAS

SEQ ID NO: 371 - protein, 745 aa, Homo sapiens; identical to SEQ ID NO: 370

SEQ ID NO: 372 - protein, 102 aa, Homo sapiens [sequence omitted]

SEQ ID NO: 373 - protein, 303 aa, Homo sapiens
MARGKAKEEGSWKKFIWNSEKKEFLGRTGGSWFKILLFYVIFYGCLAGIFIGTIQVMLLTISEFKPTYQDRVAPPGLTQIPQIQKTEISFRPNDPKSYEAYVLNIVRFLEKYKDSAQRDDMIFEDCGDVPSEPKERGDFNHERGERKVCRFKLEWLGNCSGLNDETYGYKEGKPCIIIKLNRVLGFKPKPPKNESLETYPVMKYNPNVLPVQCTGKRDEDKDKVGNVEYFGLGNSPGFPLQYYPYYGKLLQPKYLQPLLAVQFTNLTMDTEIRIECKAYGENIGYSEKDRFQGRFDVKIEVKS

SEQ ID NO: 374 - protein, 303 aa, Homo sapiens; identical to SEQ ID NO: 373

SEQ ID NO: 375 - protein, 731 aa, Homo sapiens
MVVEHPEFLKAGKEPGLQIWRVEKFDLVPVPTNLYGDFFTGDAYVILKTVQLRNGNLQYDLHYWLGNECSQDESGAAAIFTVQLDDYLNGRAVQHREVQGFESATFLGYFKSGLKYKKGGVASGFKHVVPNEVVVQRLFQVKGRRVVRATEVPVSWESFNNGDCFILDLGNNIHQWCGSNSNRYERLKATQVSKGIRDNERSGRARVHVSEEGTEPEAMLQVLGPKPALPAGTEDTAKEDAANRKLAKLYKVSNGAGTMSVSLVADENPFAQGALKSEDCFILDHGKDGKIFVWKGKQANTEERKAALKTASDFITKMDYPKQTQVSVLPEGGETPLFKQFFKNWRDPDQTDGLGLSYLSSHIANVERVPFDAATLHTSTAMAAQHGMDDDGTGQKQIWRIEGSNKVPVDPATYGQFYGGDSYIILYNYRHGGRQGQIIYNWQGAQSTQDEVAASAILTAQLDEELGGTPVQSRVVQGKEPAHLMSLFGGKPMIIYKGGTSREGGQTAPASTRLFQVRANSAGATRAVEVLPKAGALNSNDAFVLKTPSAAYLWVGTGASEAEKTGAQELLRVLRAQPVQVAEGSEPDGFWEALGGKAAYRTSPRLKDKKMDAHPPRLFACSNKIGRFVIEEVPGELMQEDLATDDVMLLDTWDQVFVWVGKDSQEEEKTEALTSAKRYIETDPANRDRRTPITVVKQGFEPPSFVGWFLGWDDDYWSVDPLDRAMAELAA

SEQ ID NO: 376 - protein, 731 aa, Homo sapiens; identical to SEQ ID NO: 375

SEQ ID NO: 377 - protein, 742 aa, Homo sapiens
MEKLFCCFPNSMVVEHPEFLKAGKEPGLQIWRVEKFDLVPVPTNLYGDFFTGDAYVILKTVQLRNGNLQYDLHYWLGNECSQDESGAAAIFTVQLDDYLNGRAVQHREVQGFESATFLGYFKSGLKYKKGGVASGFKHVVPNEVVVQRLFQVKGRRVVRATEVPVSWESFNNGDCFILDLGNNIHQWCGSNSNRYERLKATQVSKGIRDNERSGRARVHVSEEGTEPEAMLQVLGPKPALPAGTEDTAKEDAANRKLAKLYKVSNGAGTMSVSLVADENPFAQGALKSEDCFILDHGKDGKIFVWKGKQANTEERKAALKTASDFITKMDYPKQTQVSVLPEGGETPLFKQFFKNWRDPDQTDGLGLSYLSSHIANVERVPFDAATLHTSTAMAAQHGMDDDGTGQKQIWRIEGSNKVPVDPATYGQFYGGDSYIILYNYRHGGRQGQIIYNWQGAQSTQDEVAASAILTAQLDEELGGTPVQSRVVQGKEPAHLMSLFGGKPMIIYKGGTSREGGQTAPASTRLFQVRANSAGATRAVEVLPKAGALNSNDAFVLKTPSAAYLWVGTGASEAEKTGAQELLRVLRAQPVQVAEGSEPDGFWEALGGKAAYRTSPRLKDKKMDAHPPRLFACSNKIGRFVIEEVPGELMQEDLATDDVMLLDTWDQVFVWVGKDSQEEEKTEALTSAKRYIETDPANRDRRTPITVVKQGFEPPSFVGWFLGWDDDYWSVDPLDRAMAELAA

SEQ ID NO: 378 - protein, 782 aa, Homo sapiens
MAPHRPAPALLCALSLALCALSLPVRAATASRGASQAGAPQGRVPEARPNSMVVEHPEFLKAGKEPGLQIWRVEKFDLVPVPTNLYGDFFTGDAYVILKTVQLRNGNLQYDLHYWLGNECSQDESGAAAIFTVQLDDYLNGRAVQHREVQGFESATFLGYFKSGLKYKKGGVASGFKHVVPNEVVVQRLFQVKGRRVVRATEVPVSWESFNNGDCFILDLGNNIHQWCGSNSNRYERLKATQVSKGIRDNERSGRARVHVSEEGTEPEAMLQVLGPKPALPAGTEDTAKEDAANRKLAKLYKVSNGAGTMSVSLVADENPFAQGALKSEDCFILDHGKDGKIFVWKGKQANTEERKAALKTASDFITKMDYPKQTQVSVLPEGGETPLFKQFFKNWRDPDQTDGLGLSYLSSHIANVERVPFDAATLHTSTAMAAQHGMDDDGTGQKQIWRIEGSNKVPVDPATYGQFYGGDSYIILYNYRHGGRQGQIIYNWQGAQSTQDEVAASAILTAQLDEELGGTPVQSRVVQGKEPAHLMSLFGGKPMIIYKGGTSREGGQTAPASTRLFQVRANSAGATRAVEVLPKAGALNSNDAFVLKTPSAAYLWVGTGASEAEKTGAQELLRVLRAQPVQVAEGSEPDGFWEALGGKAAYRTSPRLKDKKMDAHPPRLFACSNKIGRFVIEEVPGELMQEDLATDDVMLLDTWDQVFVWVGKDSQEEEKTEALTSAKRYIETDPANRDRRTPITVVKQGFEPPSFVGWFLGWDDDYWSVDPLDRAMAELAA

SEQ ID NO: 379 - protein, 782 aa, Homo sapiens; identical to SEQ ID NO: 378

SEQ ID NO: 380 - protein, 588 aa, Homo sapiens [sequence omitted]

SEQ ID NO: 381 - protein, 669 aa, Homo sapiens [sequence omitted]

SEQ ID NO: 382 - protein, 587 aa, Homo sapiens
MASEDIAKLAETLAKTQVAGGQLSFKGKSLKLNTAEDAKDVIKEIEDFDSLEALRLEGNTVGVEAARVIAKALEKKSELKRCHWSDMFTGRLRTEIPPALISLGEGLITAGAQLVELDLSDNAFGPDGVQGFEALLKSSACFTLQELKLNNCGMGIGGGKILAAALTECHRKSSAQGKPLALKVFVAGRNRLENDGATALAEAFRVIGTLEEVHMPQNGINHPGITALAQAFAVNPLLRVINLNDNTFTEKGAVAMAETLKTLRQVEVINFGDCLVRSKGAVAIADAIRGGLPKLKELNLSFCEIKRDAALAVAEAMADKAELEKLDLNGNTLGEEGCEQLQEVLEGFNMAKVLASLSDDEDEEEEEEGEEEEEEAEEEEEEDEEEEEEEEEEEEEEPQQRGQGEKSATPSRKILDPNTGEPAPVLSSPPPADVSTFLAFPSPEKLLRLGPKSSVLIAQQTDTSDPEKVVSAFLKVSSVFKDEATVRMAVQDAVDALMQKAFNSSSFNSNTFLTRLLVHMGLLKSEDKVKAIANLYGPLMALNHMVQQDYFPKALAPLLLAFVTKPNSALESCSFARHSLLQTLYKV

SEQ ID NO: 383 - protein, 587 aa, Homo sapiens; identical to SEQ ID NO: 382

SEQ ID NO: 384 - protein, 587 aa, Homo sapiens; identical to SEQ ID NO: 382

SEQ ID NO: 385 - protein, 587 aa, Homo sapiens; identical to SEQ ID NO: 382

SEQ ID NO: 386 - protein, 615 aa, Homo sapiens [sequence omitted]

SEQ ID NO: 387 - protein, 711 aa, Homo sapiens [sequence omitted]

SEQ ID NO: 388 - protein, 711 aa, Homo sapiens [sequence omitted]

SEQ ID NO: 389 - protein, 711 aa, Homo sapiens
MKLVFLVLLFLGALGLCLAGRRRRSVQWCAVSQPEATKCFQWQRNMRKVRGPPVSCIKRDSPIQCIQAIAENRADAVTLDGGFIYEAGLAPYKLRPVAAEVYGTERQPRTHYYAVAVVKKGGSFQLNELQGLKSCHTGLRRTAGWNVPTGTLRPFLNWTGPPEPIEAAVARFFSASCVPGADKGQFPNLCRLCAGTGENKCAFSSQEPYFSYSGAFKCLRDGAGDVAFIRESTVFEDLSDEAERDEYELLCPDNTRKPVDKFKDCHLARVPSHAVVARSVNGKEDAIWNLLRQAQEKFGKDKSPKFQLFGSPSGQKDLLFKDSAIGFSRVPPRIDSGLYLGSGYFTAIQNLRKSEEEVAARRARVVWCAVGEQELRKCNQWSGLSEGSVTCSSASTTEDCIALVLKGEADAMSLDGGYVYTACKCGLVPVLAENYKSQQSSDPDPNCVDRPVEGYLAVAVVRRSDTSLTWNSVKGKKSCHTAVDRTAGWNIPMGLLFNQTGSCKFDEYFSQSCAPGSDPRSNLCALCIGDEQGENKCVPNSNERYYGYTGAFRCLAENAGDVAFVKDVTVLQNTDGNNNEAWAKDLKLADFALLCLDGKRKPVTEARSCHLAMAPNHAVVSRMDKVERLKQVLLHQQAKFGRNGSDCPDKFCLFQSETKNLLFNDNTECLARLHGKTTYEKYLGPQYVAGITNLKKCSTSPLLEACEFLRK

SEQ ID NO: 390 - protein, 77 aa, Homo sapiens
MLSILVTSRVTVSSLSDVWPLSCSAPFSVRHAASTLKPRASSCLASRFPKPESQPVIKTYLSWRWLTTCLSRYQCRR

SEQ ID NO: 391 - protein, 189 aa, Homo sapiens
MASKRALVILAKGAEEMETVIPVDVMRRAGIKVTVAGLAGKDPVQCSRDVVICPDASLEDAKKEGPYDVVVLPGGNLGAQNLSESAAVKEILKEQENRKGLIAAICAGPTALLAHEIGFGSKVTTHPLAKDKMMNGGHYTYSENRVEKDGLILTSRGPGTSFEFALAIVEALNGKEVAAQVKAPLVLKD

SEQ ID NO: 392 - protein, 189 aa, Homo sapiens; identical to SEQ ID NO: 391

SEQ ID NO: 393 - protein, 4127 aa, Homo sapiens
MAGSGAGVRCSLLRLQETLSAADRCGAALAGHQLIRGLGQECVLSSSPAVLALQTSLVFSRDFGLLVFVRKSLNSIEFRECREEILKFLCIFLEKMGQKIAPYSVEIKNTCTSVYTKDRAAKCKIPALDLLIKLLQTFRSSRLMDEFKIGELFSKFYGELALKKKIPDTVLEKVYELLGLLGEVHPSEMINNAENLFRAFLGELKTQMTSAVREPKLPVLAGCLKGLSSLLCNFTKSMEEDPQTSREIFNFVLKAIRPQIDLKRYAVPSAGLRLFALHASQFSTCLLDNYVSLFEVLLKWCAHTNVELKKAALSALESFLKQVSNMVAKNAEMHKNKLQYFMEQFYGIIRNVDSNNKELSIAIRGYGLFAGPCKVINAKDVDFMYVELIQRCKQMFLTQTDTGDDRVYQMPSFLQSVASVLLYLDTVPEVYTPVLEHLVVMQIDSFPQYSPKMQLVCCRAIVKVFLALAAKGPVLRNCISTVVHQGLIRICSKPVVLPKGPESESEDHRASGEVRTGKWKVPTYKDYVDLFRHLLSSDQMMDSILADEAFFSVNSSSESLNHLLYDEFVKSVLKIVEKLDLTLEIQTVGEQENGDEAPGVWMIPTSDPAANLHPAKPKDFSAFINLVEFCREILPEKQAEFFEPWVYSFSYELILQSTRLPLISGFYKLLSITVRNAKKIKYFEGVSPKSLKHSPEDPEKYSCFALFVKFGKEVAVKMKQYKDELLASCLTFLLSLPHNIIELDVRAYVPALQMAFKLGLSYTPLAEVGLNALEEWSIYIDRHVMQPYYKDILPCLDGYLKTSALSDETKNNWEVSALSRAAQKGFNKVVLKHLKKTKNLSSNEAISLEEIRIRVVQMLGSLGGQINKNLLTVTSSDEMMKSYVAWDREKRLSFAVPFREMKPVIFLDVFLPRVTELALTASDRQTKVAACELLHSMVMFMLGKATQMPEGGQGAPPMYQLYKRTFPVLLRLACDVDQVTRQLYEPLVMQLIHWFTNNKKFESQDTVALLEAILDGIVDPVDSTLRDFCGRCIREFLKWSIKQITPQQQEKSPVNTKSLFKRLYSLALHPNAFKRLGASLAFNNIYREFREEESLVEQFVFEALVIYMESLALAHADEKSLGTIQQCCDAIDHLCRIIEKKHVSLNKAKKRRLPRGFPPSASLCLLDLVKWLLAHCGRPQTECRHKSIELFYKFVPLLPGNRSPNLWLKDVLKEEGVSFLINTFEGGGCGQPSGILAQPTLLYLRGPFSLQATLCWLDLLLAALECYNTFIGERTVGALQVLGTEAQSSLLKAVAFFLESIAMHDIIAAEKCFGTGAAGNRTSPQEGERYNYSKCTVVVRIMEFTTTLLNTSPEGWKLLKKDLCNTHLMRVLVQTLCEPASIGFNIGDVQVMAHLPDVCVNLMKALKMSPYKDILETHLREKITAQSIEELCAVNLYGPDAQVDRSRLAAVVSACKQLHRAGLLHNILPSQSTDLHHSVGTELLSLVYKGIAPGDERQCLPSLDLSCKQLASGLLELAFAFGGLCERLVSLLLNPAVLSTASLGSSQGSVIHFSHGEYFYSLFSETINTELLKNLDLAVLELMQSSVDNTKMVSAVLNGMLDQSFRERANQKHQGLKLATTILQHWKKCDSWWAKDSPLETKMAVLALLAKILQIDSSVSFNTSHGSFPEVFTTYISLLADTKLDLHLKGQAVTLLPFFTSLTGGSLEELRRVLEQLIVAHFPMQSREFPPGTPRFNNYVDCMKKFLDALELSQSPMLLELMTEVLCREQQHVMEELFQSSFRRIARRGSCVTQVGLLESVYEMFRKDDPRLSFTRQSFVDRSLLTLLWHCSLDALREFFSTIVVDAIDVLKSRFTKLNESTFDTQITKKMGYYKILDVMYSRLPKDDVHAKESKINQVFHGSCITEGNELTKTLIKLCYDAFTENMAGENQLLERRRLYHCAAYNCAISVICCVFNELKFYQGFLFSEKPEKNLLIFENLIDLKRRYNFPVEVEVPMERKKKYIEIRKEAREAANGDSDGPSYMSSLSYLADSTLSEEMSQFDFSTGVQSYSYSSQDPRPATGRFRRREQRDPTVHDDVLELEMDELNRHECMAPLTALVKHMHRSLGPPQGEEDSVPRDLPSWMKFLHGKLGNPIVPLNIRLFLAKLVINTEEVFRPYAKHWLSPLLQLAASENNGGEGIHYMVVEIVATILSWTGLATPTGVPKDEVLANRLLNFLMKHVFHPKRAVFRHNLEIIKTLVECWKDCLSIPYRLIFEKFSGKDPNSKDNSVGIQLLGIVMANDLPPYDPQCGIQSSEYFQALVNNMSFVRYKEVYAAAAEVLGLILRYVMERKNILEESLCELVAKQLKQHQNTMEDKFIVCLNKVTKSFPPLADRFMNAVFFLLPKFHGVLKTLCLEVVLCRVEGMTELYFQLKSKDFVQVMRHRDDERQKVCLDIIYKMMPKLKPVELRELLNPVVEFVSHPSTTCREQMYNILMWIHDNYRDPESETDNDSQEIFKLAKDVLIQGLIDENPGLQLIIRNFWSHETRLPSNTLDRLLALNSLYSPKIEVHFLSLATNFLLEMTSMSPDYPNPMFEHPLSECEFQEYTIDSDWRFRSTVLTPMFVETQASQGTLQTRTQEGSLSARWPVAGQIRATQQQHDFTLTQTADGRSSFDWLTGSSTDPLVDHTSPSSDSLLFAHKRSERLQRAPLKSVGPDFGKKRLGLPGDEVDNKVKGAAGRTDLLRLRRRFMRDQEKLSLMYARKGVAEQKREKEIKSELKMKQDAQVVLYRSYRHGDLPDIQIKHSSLITPLQAVAQRDPIIAKQLFSSLFSGILKEMDKFKTLSEKNNITQKLLQDFNRFLNTTFSFFPPFVSCIQDISCQHAALLSLDPAAVSAGCLASLQQPVGIRLLEEALLRLLPAELPAKRVRGKARLPPDVLRWVELAKLYRSIGEYDVLRGIFTSEIGTKQITQSALLAEARSDYSEAAKQYDEALNKQDWVDGEPTEAEKDFWELASLDCYNHLAEWKSLEYCSTASIDSENPPDLNKIWSEPFYQETYLPYMIRSKLKLLLQGEADQSLLTFIDKAMHGELQKAILELHYSQELSLLYLLQDDVDRAKYYIQNGIQSFMQNYSSIDVLLHQSRLTKLQSVQALTEIQEFISFISKQGNLSSQVPLKRLLNTWTNRYPDAKMDPMNIWDDIITNRCFFLSKIEEKLTPLPEDNSMNVDQDGDPSDRMEVQEQEEDISSLIRSCKFSMKMKMIDSARKQNNFSLAMKLLKELHKESKTRDDWLVSWVQSYCRLSHCRSRSQGCSEQVLTVLKTVSLLDENNVSSYLSKNILAFRDQNILLGTTYRIIANALSSEPACLAEIEEDKARRILELSGSSSEDSEKVIAGLYQRAFQHLSEAVQAAEEEAQPPSWSCGPAAGVIDAYMTLADFCDQQLRKEEENASVIDSAELQAYPALVVEKMLKALKLNSNEARLKFPRLLQIIERYPEETLSLMTKEISSVPCWQFISWISHMVALLDKDQAVAVQHSVEEITDNYPQAIVYPFIISSESYSFKDTSTGHKNKEFVARIKSKLDQGGVIQDFINALDQLSNPELLFKDWSNDVRAELAKTPVNKKNIEKMYERMYAALGDPKAPGLGAFRRKFIQTFGKEFDKHFGKGGSKLLRMKLSDFNDITNMLLLKMNKDSKPPGNLKECSPWMSDFKVEFLRNELEIPGQYDGRGKPLPEYHVRIAGFDERVVMASLRRPKRIIIRGHDEREHPFLVKGGEDLRQDQRVEQLFQVMNGILAQDSACSQRALQLRTYSVVPMTSRLGLIEWLENTVTLKDLLLNTMSQEEKAAYLSDPRAPPCEYKDWLTKMSGKHDVGAYMLMYKGANRTETVTSFRKRESKVPADLLKRAFVRMSTSPEAFLALRSHFASSHALICISHWILGIGDRHLNNFMVAMETGGVIGIDFGHAFGSATQFLPVPELMPFRLTRQFINLMLPMKETGLMYSIMVHALRAFRSDPGLLTNTMDVFVKEPSFDWKNFEQKMLKKGGSWIQEINVAEKNWYPRQKICYAKRKLAGANPAVITCDELLLGHEKAPAFRDYVAVARGSKDHNIRAQEPESGLSEETQVKCLMDQATDPNILGRTWEGWEPWM

SEQ ID NO: 394 - protein, 4128 aa, Homo sapiens [sequence omitted]

SEQ ID NO: 395 - protein, 4096 aa, Homo sapiens
MAGSGAGVRCSLLRLQETLSAADRCGAALAGHQLIRGLGQECVLSSSPAVLALQTSLVFSRDFGLLVFVRKSLNSIEFRECREEILKFLCIFLEKMGQKIAPYSVEIKNTCTSVYTKDRAAKCKIPALDLLIKLLQTFRSSRLMDEFKIGELFSKFYGELALKKKIPDTVLEKVYELLGLLGEVHPSEMINNAENLFRAFLGELKTQMTSAVREPKLPVLAGCLKGLSSLLCNFTKSMEEDPQTSREIFNFVLKAIRPQIDLKRYAVPSAGLRLFALHASQFSTCLLDNYVSLFEVLLKWCAHTNVELKKAALSALESFLKQVSNMVAKNAEMHKNKLQYFMEQFYGIIRNVDSNNKELSIAIRGYGLFAGPCKVINAKDVDFMYVELIQRCKQMFLTQTDTGDDRVYQMPSFLQSVASVLLYLDTVPEVYTPVLEHLVVMQIDSFPQYSPKMQLVCCRAIVKVFLALAAKGPVLRNCISTVVHQGLIRICSKPVVLPKGPESESEDHRASGEVRTGKWKVPTYKDYVDLFRHLLSSDQMMDSILADEAFFSVNSSSESLNHLLYDEFVKSVLKIVEKLDLTLEIQTVGEQENGDEAPGVWMIPTSDPAANLHPAKPKDFSAFINLVEFCREILPEKQAEFFEPWVYSFSYELILQSTRLPLISGFYKLLSITVRNAKKIKYFEGVSPKSLKHSPEDPEKYSCFALFVKFGKEVAVKMKQYKDELLASCLTFLLSLPHNIIELDVRAYVPALQMAFKLGLSYTPLAEVGLNALEEWSIYIDRHVMQPYYKDILPCLDGYLKTSALSDETKNNWEVSALSRAAQKGFNKVVLKHLKKTKNLSSNEAISLEEIRIRVVQMLGSLGGQINKNLLTVTSSDEMMKSYVAWDREKRLSFAVPFREMKPVIFLDVFLPRVTELALTASDRQTKVAACELLHSMVMFMLGKATQMPEGGQGAPPMYQLYKRTFPVLLRLACDVDQVTRQLYEPLVMQLIHWFTNNKKFESQDTVALLEAILDGIVDPVDSTLRDFCGRCIREFLKWSIKQITPQQQEKSPVNTKSLFKRLYSLALHPNAFKRLGASLAFNNIYREFREEESLVEQFVFEALVIYMESLALAHADEKSLGTIQQCCDAIDHLCRIIEKKHVSLNKAKKRRLPRGFPPSASLCLLDLVKWLLAHCGRPQTECRHKSIELFYKFVPLLPGNRSPNLWLKDVLKEEGVSFLINTFEGGGCGQPSGILAQPTLLYLRGPFSLQATLCWLDLLLAALECYNTFIGERTVGALQVLGTEAQSSLLKAVAFFLESIAMHDIIAAEKCFGTGAAGNRTSPQEGERYNYSKCTVVVRIMEFTTTLLNTSPEGWKLLKKDLCNTHLMRVLVQTLCEPASIGFNIGDVQVMAHLPDVCVNLMKALKMSPYKDILETHLREKITAQSIEELCAVNLYGPDAQVDRSRLAAVVSACKQLHRAGLLHNILPSQSTDLHHSVGTELLSLVYKGIAPGDERQCLPSLDLSCKQLASGLLELAFAFGGLCERLVSLLLNPAVLSTASLGSSQGSVIHFSHGEYFYSLFSETINTELLKNLDLAVLELMQSSVDNTKMVSAVLNGMLDQSFRERANQKHQGLKLATTILQHWKKCDSWWAKDSPLETKMAVLALLAKILQIDSSVSFNTSHGSFPEVFTTYISLLADTKLDLHLKGQAVTLLPFFTSLTGGSLEELRRVLEQLIVAHFPMQSREFPPGTPRFNNYVDCMKKFLDALELSQSPMLLELMTEVLCREQQHVMEELFQSSFRRIARRGSCVTQVGLLESVYEMFRKDDPRLSFTRQSFVDRSLLTLLWHCSLDALREFFSTIVVDAIDVLKSRFTKLNESTFDTQITKKMGYYKILDVMYSRLPKDDVHAKESKINQVFHGSCITEGNELTKTLIKLCYDAFTENMAGENQLLERRRLYHCAAYNCAISVICCVFNELKFYQGFLFSEKPEKNLLIFENLIDLKRRYNFPVEVEVPMERKKKYIEIRKEAREAANGDSDGPSYMSSLSYLADSTLSEEMSQFDFSTGVQSYSYSSQDPRPATGRFRRREQRDPTVHDDVLELEMDELNRHECMAPLTALVKHMHRSLGPPQGEEDSVPRDLPSWMKFLHGKLGNPIVPLNIRLFLAKLVINTEEVFRPYAKHWLSPLLQLAASENNGGEGIHYMVVEIVATILSWTGLATPTGVPKDEVLANRLLNFLMKHVFHPKRAVFRHNLEIIKTLVECWKDCLSIPYRLIFEKFSGKDPNSKDNSVGIQLLGIVMANDLPPYDPQCGIQSSEYFQALVNNMSFVRYKEVYAAAAEVLGLILRYVMERKNILEESLCELVAKQLKQHQNTMEDKFIVCLNKVTKSFPPLADRFMNAVFFLLPKFHGVLKTLCLEVVLCRVEGMTELYFQLKSKDFVQVMRHRDDERQKVCLDIIYKMMPKLKPVELRELLNPVVEFVSHPSTTCREQMYNILMWIHDNYRDPESETDNDSQEIFKLAKDVLIQGLIDENPGLQLIIRNFWSHETRLPSNTLDRLLALNSLYSPKIEVHFLSLATNFLLEMTSMSPDYPNPMFEHPLSECEFQEYTIDSDWRFRSTVLTPMFVETQASQGTLQTRTQEGSLSARWPVAGQIRATQQQHDFTLTQTADGRSSFDWLTGSSTDPLVDHTSPSSDSLLFAHKRSERLQRAPLKSVGPDFGKKRLGLPGDEVDNKVKGAAGRTDLLRLRRRFMRDQEKLSLMYARKGVAEQKREKEIKSELKMKQDAQVVLYRSYRHGDLPDIQIKHSSLITPLQAVAQRDPIIAKQLFSSLFSGILKEMDKFKTLSEKNNITQKLLQDFNRFLNTTFSFFPPFVSCIQDISCQHAALLSLDPAAVSAGCLASLQQPVGIRLLEEALLRLLPAELPAKRVRGKARLPPDVLRWVELAKLYRSIGEYDVLRGIFTSEIGTKQITQSALLAEARSDYSEAAKQYDEALNKQDWVDGEPTEAEKDFWELASLDCYNHLAEWKSLEYCSTASIDSENPPDLNKIWSEPFYQETYLPYMIRSKLKLLLQGEADQSLLTFIDKAMHGELQKAILELHYSQELSLLYLLQDDVDRAKYYIQNGIQSFMQNYSSIDVLLHQSRLTKLQSVQALTEIQEFISFISKQGNLSSQVPLKRLLNTWTNRYPDAKMDPMNIWDDIITNRCFFLSKIEEKLTPLPEDNSMNVDQDGDPSDRMEVQEQEEDISSLIRSCKFSMKMKMIDSARKQNNFSLAMKLLKELHKESKTRDDWLVSWVQSYCRLSHCRSRSQGCSEQVLTVLKTVSLLDENNVSSYLSKNILAFRDQNILLGTTYRIIANALSSEPACLAEIEEDKARRILELSGSSSEDSEKVIAGLYQRAFQHLSEAVQAAEEEAQPPSWSCGPAAGVIDAYMTLADFCDQQLRKEEENASVIDSAELQAYPALVVEKMLKALKLNSNEARLKFPRLLQIIERYPEETLSLMTKEISSVPCWQFISWISHMVALLDKDQAVAVQHSVEEITDNYPQAIVYPFIISSESYSFKDTSTGHKNKEFVARIKSKLDQGGVIQDFINALDQLSNPELLFKDWSNDVRAELAKTPVNKKNIEKMYERMYAALGDPKAPGLGAFRRKFIQTFGKEFDKHFGKGGSKLLRMKLSDFNDITNMLLLKMNKDSKPPGNLKECSPWMSDFKVEFLRNELEIPGQYDGRGKPLPEYHVRIAGFDERVVMASLRRPKRIIIRGHDEREHPFLVKGGEDLRQDQRVEQLFQVMNGILAQDSACSQRALQLRTYSVVPMTSSDPRAPPCEYKDWLTKMSGKHDVGAYMLMYKGANRTETVTSFRKRESKVPADLLKRAFVRMSTSPEAFLALRSHFASSHALICISHWILGIGDRHLNNFMVAMETGGVIGIDFGHAFGSATQFLPVPELMPFRLTRQFINLMLPMKETGLMYSIMVHALRAFRSDPGLLTNTMDVFVKEPSFDWKNFEQKMLKKGGSWIQEINVAEKNWYPRQKICYAKRKLAGANPAVITCDELLLGHEKAPAFRDYVAVARGSKDHNIRAQEPESGLSEETQVKCLMDQATDPNILGRTWEGWEPWM

SEQ ID NO: 396 - protein, 4096 aa, Homo sapiens
MAGSGAGVRCSLLRLQETLSAADRCGAALAGHQLIRGLGQECVLSSSPAVLALQTSLVFSRDFGLLVFVRKSLNSIEFRECREEILKFLCIFLEKMGQKIAPYSVEIKNTCTSVYTKDRAAKCKIPALDLLIKLLQTFRSSRLMDEFKIGELFSKFYGELALKKKIPDTVLEKVYELLGLLGEVHPSEMINNAENLFRAFLGELKTQMTSAVREPKLPVLAGCLKGLSSLLCNFTKSMEEDPQTSREIFNFVLKAIRPQIDLKRYAVPSAGLRLFALHASQFSTCLLDNYVSLFEVLLKWCAHTNVELKKAALSALESFLKQVSNMVAKNAEMHKNKLQYFMEQFYGIIRNVDSNNKELSIAIRGYGLFAGPCKVINAKDVDFMYVELIQRCKQMFLTQTDTGDYRVYQMPSFLQSVASVLLYLDTVPEVYTPVLEHLVVMQIDSFPQYSPKMQLVCCRAIVKVFLALAAKGPVLRNCISTVVHQGLIRICSKPVVLPKGPESESEDHRASGEVRTGKWKVPTYKDYVDLFRHLLSSDQMMDSILADEAFFSVNSSSESLNHLLYDEFVKSVLKIVEKLDLTLEIQTVGEQENGDEAPGVWMIPTSDPAANLHPAKPKDFSAFINLVEFCREILPEKQAEFFEPWVYSFSYELILQSTRLPLISGFYKLLSITVRNAKKIKYFEGVSPKSLKHSPEDPEKYSCFALFVKFGKEVAVKMKQYKDELLASCLTFLLSLPHNIIELDVRAYVPALQMAFKLGLSYTPLAEVGLNALEEWSIYIDRHVMQPYYKDILPCLDGYLKTSALSDETKNNWEVSALSRAAQKGFNKVVLKHLKKTKNLSSNEAISLEEIRIRVVQMLGSLGGQINKNLLTVTSSDEMMKSYVAWDREKRLSFAVPFREMKPVIFLDVFLPRVTELALTASDRQTKVAACELLHSMVMFMLGKATQMPEGGQGAPPMYQLYKRTFPVLLRLACDVDQVTRQLYEPLVMQLIHWFTNNKKFESQDTVSLLEAILDGIVDPVDSTLRDFCGRCIREFLKWSIKQITPQQQEKSPVNTKSLFKRLYSLALHPNAFKRLGASLAFNNIYREFREEESLVEQFVFEALVIYMESLALAHADEKSLGTIQQCCDAIDHLCRIIEKKHVSLNKAKKRRLPRGFPPSASLCLLDLVKWLLAHCGRPQTECRHKSIELFYKFVPLLPGNRSPNLWLKDVLKEEGVSFLINTFEGGGCGQPSGILAQPTLLYLRGPFSLQATLCWLDLLLAALECYNTFIGERTVGALQVLGTEAQSSLLKAVAFFLESIAMHDIIAAEKCFGTGAAGNRTSPQEGERYNYSKCTVVVRIMEFTTTLLNTSPEGWKLLKKDLCNTHLMRVLVQTLCEPASIGFNIGDVQVMAHLPDVCVNLMKALKMSPYKDILETHLREKITAQSIEELCAVNLYGPDAQVDRSRLAAVVSACKQLHRAGLLHNILPSQSTDLHHSVGTELLSLVYKGIAPGDERQCLPSLDLSCKQLASGLLELAFAFGGLCERLVSLLLNPAVLSTASLGSSQGSVIHFSHGEYFYSLFSETINTELLKNLDLAVLELMQSSVDNTKMVSAVLNGMLDQSFRERANQKHQGLKLATTILQHWKKCDSWWAKDSPLETKMAVLALLAKILQIDSSVSFNTSHGSFPEVFTTYISLLADTKLDLHLKGQAVTLLPFFTSLTGGSLEELRRVLEQLIVAHFPMQSREFPPGTPRFNNYVDCMKKFLDALELSQSPMLLELMTEVLCREQQHVMEELFQSSFRRIARRGSCVTQVGLLESVYEMFRKDDPRLSFTRQSFVDRSLLTLLWHCSLDALREFFSTIVVDAIDVLKSRFTKLNESTFDTQITKKMGYYKILDVMYSRLPKDDVHAKESKINQVFHGSCITEGNELTKTLIKLCYDAFTENMAGENQLLERRRLYHCAAYNCAISVICCVFNELKFYQGFLFSEKPEKNLLIFENLIDLKRRYNFPVEVEVPMERKKKYIEIRKEAREAANGDSDGPSYMSSLSYLADSTLSEEMSQFDFSTGVQSYSYSSQDPRPATGRFRRREQRDPTVHDDVLELEMDELNRHECMAPLTALVKHMHRSLGPPQGEEDSVPRDLPSWMKFLHGKLGNPIVPLNIRLFLAKLVINTEEVFRPYAKHWLSPLLQLAASENNGGEGIHYMVVEIVATILSWTGLATPTGVPKDEVLANRLLNFLMKHVFHPKRAVFRHNLEIIKTLVECWKDCLSIPYRLIFEKFSGKDPNSKDNSVGIQLLGIVMANDLPPYDPQCGIQSSEYFQALVNNMSFVRYKEVYAAAAEVLGLILRYVMERKNILEESLCELVAKQLKQHQNTMEDKFIVCLNKVTKSFPPLADRFMNAVFFLLPKFHGVLKTLCLEVVLCRVEGMTELYFQLKSKDFVQVMRHRDERQKVCLDIIYKMMPKLKPVELRELLNPVVEFVSHPSTTCREQMYNILMWIHDNYRDPESETDNDSQEIFKLAKDVLIQGLIDENPGLQLIIRNFWSHETRLPSNTLDRLLALNSLYSPKIEVHFLSLATNFLLEMTSMSPDYPNPMFEHPLSECEFQEYTIDSDWRFRSTVLTPMFVETQASQGTLQTRTQEGSLSARWPVAGQIRATQQQHDFTLTQTADGRSSFDWLTGSSTDPLVDHTSPSSDSLLFAHKRSERLQRAPLKSVGPDFGKKRLGLPGDEVDNKVKGAAGRTDLLRLRRRFMRDQEKLSLMYARKGVAEQKREKEIKSELKMKQDAQVVLYRSYRHGDLPDIQIKHSSLITPLQAVAQRDPIIAKQLFSSLFSGILKEMDKFKTLSEKNNITQKLLQDFNRFLNTTFSFFPPFVSCIQDISCQHAALLSLDPAAVSAGCLASLQQPVGIRLLEEALLRLLPAELPAKRVRGKARLPPDVLRWVELAKLYRSIGEYDVLRGIFTSEIGTKQITQSALLAEARSDYSEAAKQYDEALNKQDWVDGEPTEAEKDFWELASLDCYNHLAEWKSLEYCSTASIDSENPPDLNKIWSEPFYQETYLPYMIRSKLKLLLQGEADQSLLTFIDKAMHGELQKAILELHYSQELSLLYLLQDDVDRAKYYIQNGIQSFMQNYSSIDVLLHQSRLTKLQSVQALTEIQEFISFISKQGNLSSQVPLKRLLNTWTNRYPDAKMDPMNIWDDIITNRCFFLSKIEEKLTPLPEDNSMNVDQDGDPSDRMEVQEQEEDISSLIRSCKFSMKMKMIDSARKQNNFSLAMKLLKELHKESKTRDDWLVSWVQSYCRLSHCRSRSQGCSEQVLTVLKTVSLLDENNVSSYLNKNILAFRDQNILLGTTYRIIANALSSEPACLAEIEEDKARRILELSGSSSEDSEKVIAGLYQRAFQHLSEAVQAAEEEAQPPSWSCGPAAGVIDAYMTLADFCDQQLRKEEENASVTDSAELQAYPALVVEKMLKALKLNSNEARLKFPRLLQIIERYPEETLSLMTKEISSVPCWQFISWISHMVALLDKDQAVAVQHSVEEITDNYPQAIVYPFIISSESYSFKDTSTGHKNKEFVARIKSKLDQGGVIQDFINALDQLSNPELLFKDWSNDVRAELAKTPVNKKNIEKMYERMYAALGDPKAPGLGAFRRKFIQTFGKEFDKHFGKGGSKLLRMKLSDFNDITNMLLLKMNKDSKPPGNLKECSPWMSDFKVEFLRNELEIPGQYDGRGKPLPEYHVRIAGFDERVTVMASLRRPKRIIIRGHDEREHPFLVKGGEDLRQDQRVEQLFQVMNGILAQDSACSQRALQLRTYSVVPMTSSDPRAPPCEYKDWLTKMSGKHDVGAYMLMYKGANRTETVTSFRKRESKVPADLLKRAFVRMSTSPEAFLALRSHFASSHALICISHWILGIGDRHLNNFMVAMETGGVIGIDFGHAFGSATQFLPVPELMPFRLTRQFINLMLPMKETGLMYSIMVHALRAFRSDPGLLTNTMDVFVKEPSFDWKNFEQKMLKKGGSWIQEINVAEKNWYPRQKICYAKRKLAGANPAVITCDELLLGHEKAPAFRDYVAVARGSKDHNIRAQEPESGLSEETQVKCLMDQATDPNILGRTWEGWEPWM

SEQ ID NO: 397 - protein, 4128 aa, Homo sapiens [sequence omitted]

SEQ ID NO: 398 - protein, 534 aa, Homo sapiens [sequence omitted]

SEQ ID NO: 399 - protein, 606 aa, Homo sapiens [sequence omitted]

SEQ ID NO: 400 - protein, 545 aa, Homo sapiens [sequence omitted]

SEQ ID NO: 401 - protein, 619 aa, Homo sapiens [sequence omitted]

SEQ ID NO: 402 - protein, 606 aa, Homo sapiens
MPYEIKKVFASLPQVERGVSKIIGGDPKGNNFLYTNGKCVILRNIDNPALADIYTEHAHQVVVAKYAPSGFYIASGDVSGKLRIWDTTQKEHLLKYEYQPFAGKIKDIAWTEDSKRIAVVGEGREKFGAVFLWDSGSSVGEITGHNKVINSVDIKQSRPYRLATGSDDNCAAFFEGPPFKFKFTIGDHSRFVNCVRFSPDGNRFATASADGQIYIYDGKTGEKVCALGGSKAHDGGIYAISWSPDSTHLLSASGDKTSKIWDVSVNSVVSTFPMGSTVLDQQLGCLWQKDHLLSVSLSGYINYLDRNNPSKPLHVIKGHSKSIQCLTVHKNGGKSYIYSGSHDGHINYWDSETGENDSFAGKGHTNQVSRMTVDESGQLISCSMDDTVRYTSLMLRDYSGQGVVKLDVQPKCVAVGPGGYAVVVCIGQIVLLKDQRKCFSIDNPGYEPEVVAVHPGGDTVAIGGVDGNVRLYSILGTTLKDEGKLLEAKGPVTDVAYSHDGAFLAVCDASKVVTVFSVADGYSENNVFYGHHAKIVCLAWSPDNEHFASGGMDMMVYVWTLSDPETRVKIQDAHRLHHVSSLAWLDEHTLVTTSHDASVKEWTITY

SEQ ID NO: 403 - protein, 181 aa, Homo sapiens
MFKKFDEKENVSNCIQLKTSVIKGIKNQLIEQFPGIEPWLNQIMPKKDPVKIVRCHEHIEILTVNGELLFFRQREGPFYPTLRLLHKYPFILPHQQVDKGAIKFVLSGANIMCPGLTSPGAKLYPAAVDTIVAIMAEGKQHALCVGVMKMSAEDIEKVNKGIGIENIHYLNDGLWHMKTYK

SEQ ID NO: 404 - protein, 138 aa, Homo sapiens
MPKKDPVKIVRCHEHIEILTVNGELLFFRQREGPFYPTLRLLHKYPFILPHQQVDKGAIKFVLSGANIMCPGLTSPGAKLYPAAVDTIVAIMAEGKQHALCVGVMKMSAEDIEKVNKGIGIENIHYLNDGLWHMKTYK

SEQ ID NO: 405 - protein, 181 aa, Homo sapiens; identical to SEQ ID NO: 403

SEQ ID NO: 406 - protein, 181 aa, Homo sapiens; identical to SEQ ID NO: 403

SEQ ID NO: 407 - protein, 702 aa, Homo sapiens
MESPSAPPHRWCIPWQRLLLTASLLTFWNPPTTAKLTIESTPFNVAEGKEVLLLVHNLPQHLFGYSWYKGERVDGNRQIIGYVIGTQQATPGPAYSGREIIYPNASLLIQNIIQNDTGFYTLHVIKSDLVNEEATGQFRVYPELPKPSISSNNSKPVEDKDAVAFTCEPETQDATYLWWVNNQSLPVSPRLQLSNGNRTLTLFNVTRNDTASYKCETQNPVSARRSDSVILNVLYGPDAPTISPLNTSYRSGENLNLSCHAASNPPAQYSWFVNGTFQQSTQELFIPNITVNNSGSYTCQAHNSDTGLNRTTVTTITVYAEPPKPFITSNNSNPVEDEDAVALTCEPEIQNTTYLWWVNNQSLPVSPRLQLSNDNRTLTLLSVTRNDVGPYECGIQNELSVDHSDPVILNVLYGPDDPTISPSYTYYRPGVNLSLSCHAASNPPAQYSWLIDGNIQQHTQELFISNITEKNSGLYTCQANNSASGHSRTTVKTITVSAELPKPSISSNNSKPVEDKDAVAFTCEPEAQNTTYLWWVNGQSLPVSPRLQLSNGNRTLTLFNVTRNDARAYVCGIQNSVSANRSDPVTLDVLYGPDTPIISPPDSSYLSGANLNLSCHSASNPSPQYSWRINGIPQQHTQVLFIAKITPNNNGTYACFVSNLATGRNNSIVKSITVSASGTSPGLSAGATVGIMIGVLVGVALI

SEQ ID NO: 408 - protein, 702 aa, Homo sapiens; identical to SEQ ID NO: 407

SEQ ID NO: 409 - protein, 702 aa, Homo sapiens; identical to SEQ ID NO: 407

SEQ ID NO: 410 - protein, 1023 aa, Homo sapiens
MFHLRTCAAKLRPLTASQTVKTFSQNRPAAARTFQQIRCYSAPVAAEPFLSGTSSNYVEEMYCAWLENPKSVHKSWDIFFRNTNAGAPPGTAYQSPLPLSRGSLAAVAHAQSLVEAQPNVDKLVEDHLAVQSLIRAYQIRGHHVAQLDPLGILDADLDSSVPADIISSTDKLGFYGLDESDLDKVFHLPTTTFIGGQESALPLREIIRRLEMAYCQHIGVEFMFINDLEQCQWIRQKFETPGIMQFTNEEKRTLLARLVRSTRFEEFLQRKWSSEKRFGLEGCEVLIPALKTIIDKSSENGVDYVIMGMPHRGRLNVLANVIRKELEQIFCQFDSKLEAADEGSGDVKYHLGMYHRRINRVTDRNITLSLVANPSHLEAADPVVMGKTKAEQFYCGDTEGKKVMSILLHGDAAFAGQGIVYETFHLSDLPSYTTHGTVHVVVNNQIGFTTDPRMARSSPYPTDVARVVNAPIFHVNSDDPEAVMYVCKVAAEWRSTFHKDVVVDLVCYRRNGHNEMDEPMFTQPLMYKQIRKQKPVLQKYAELLVSQGVVNQPEYEEEISKYDKICEEAFARSKDEKILHIKHWLDSPWPGFFTLDGQPRSMSCPSTGLTEDILTHIGNVASSVPVENFTIHGGLSRILKTRGEMVKNRTVDWALAEYMAFGSLLKEGIHIRLSGQDVERGTFSHRHHVLHDQNVDKRTCIPMNHLWPNQAPYTVCNSSLSEYGVLGFELGFAMASPNALVLWEAQFGDFHNTAQCIIDQFICPGQAKWVRQNGIVLLLPHGMEGMGPEHSSARPERFLQMCNDDPDVLPDLKEANFDINQLYDCNWVVVNCSTPGNFFHVLRRQILLPFRKPLIIFTPKSLLRHPEARSSFDEMLPGTHFQRVIPEDGPAAQNPENVKRLLFCTGKVYYDLTRERKARDMVGQVAITRIEQLSPFPFDLLLKEVQKYPNAELAWCQEEHKNQGYYDYVKPRLRTTISRAKPVWYAGRDPAAAPATGNKKTHLTELQRLLDTAFDLDVFKNFS

SEQ ID NO: 411 - protein, 1023 aa, Homo sapiens; identical to SEQ ID NO: 410

SEQ ID NO: 412 - protein, 1002 aa, Homo sapiens
MFHLRTCAAKLRPLTASQTVKTFSQNRPAAARTFQQIRCYSAPVAAEPFLSGTSSNYVEEMYCAWLENPKSVHKSWDIFFRNTNAGAPPGTAYQSPLPLSRGSLAAVAHAQSLVEAQPNVDKLVEDHLAVQSLIRAYQIRGHHVAQLDPLGILDADLDSSVPADIISSTDKLGFYGLDESDLDKVFHLPTTTFIGGQESALPLREIIRRLEMAYCQHIGVEFMFINDLEQCQWIRQKFETPGIMQFTNEEKRTLLARLVRSTRFEEFLQRKWSSEKRFGLEGCEVLIPALKTIIDKSSENGVDYVIMGMPHRGRLNVLANVIRKELEQIFCQFDSKLEAADEGSGDVKYHLGMYHRRINRVTDRNITLSLVANPSHLEAADPVVMGKTKAEQFYCGDTEGKKVMSILLHGDAAFAGQGIVYETFHLSDLPSYTTHGTVHVVVNNQIGFTTDPRMARSSPYPTDVARVVNAPIFHVNSDDPEAVMYVCKVAAEWRSTFHKDVVVDLVCYRRNGHNEMDEPMFTQPLMYKQIRKQKPVLQKYAELLVSQGVVNQPEYEEEISKYDKICEEAFARSKDEKILHIKHWLDSPWPGFFTLDGQPRSMSCPSTGLTEDILTHIGNVASSVPVENFTIHGGLSRILKTRGEMVKNRTVDWALAEYMAFGSLLKEGIHIRLSGQDVERGTFSHRHHVLHDQNVDKRTCIPMNHLWPNQAPYTVCNSSLSEYGVLGFEAGLRMASPNALVLWEAQFGDFHNTAQCIIDQFICPGQAKWVRQNGIVLLLPHGMEGMGPEHSSARPERFLQMCNDDPDVLPDLKEANFDINQLYDCNWVVVNCSTPGNFFHVLRRQILLPFRKPLIIFTPKSLLRHPEARSSFDEMLPGTHFQRVIPEDGPAAQNPENVKRLLFCTGKVYYDLTRERKARDMVGQVAITRIEQLSPFPFDLLLKEVQKYPNAELAWCQEEHKNQGYYDYVKPRLRTTISRAKPVWYAGRNPAAAPATGNKKTH

SEQ ID NO: 413 - protein, 1023 aa, Homo sapiens; identical to SEQ ID NO: 410

SEQ ID NO: 414 - protein, 1023 aa, Homo sapiens; identical to SEQ ID NO: 410

SEQ ID NO: 415 - protein, 455 aa, Homo sapiens
MTTMAAATLLRATPHFSGLAAGRTFLLQGLLRLLKAPALPLLCRGLAVEAKKTYVRDKPHVNVGTIGHVDHGKTTLTAAITKILAEGGGAKFKKYEEIDNAPEERARGITINAAHVEYSTAARHYAHTDCPGHADYVKNMITGTAPLDGCILVVAANDGPMPQTREHLLLARQIGVEHVVVYVNKADAVQDSEMVELVELEIRELLTEFGYKGEETPVIVGSALCALEGRDPELGLKSVQKLLDAVDTYIPVPARDLEKPFLLPVEAVYSVPGRGTVVTGTLERGILKKGDECELLGHSKNIRTVVTGIEMFHKSLERAEAGDNLGALVRGLKREDLRRGLVMVKPGSIKPHQKVEAQVYILSKEEGGRHKPFVSHFMPVMFSLTWDMACRIILPPEKELAMPGEDLKFNLILRQPMILEKGQRFTLRDGNRTIGTGLVTNTLAMTEEEKNIKWG

SEQ ID NO: 416 - protein, 349 aa, Homo sapiens
MTTMAAATLLRATPHFSGLAAGRTFLLQGLLRLLKAPALPLLCRGLAVEAKKTYVRDKPHVNVGTIGHVDHGKTTLTAAITKILAEGGGAKFKKYEEIDNAPEERARGITINAAHVEYSTAARHYAHTDCPGHADYVKNMITGTAPLDGCILVVAANDGPMPQTREHLLLARQIGVEHVVVYVNKADAVQDSEMVELVELEIRELLTEFGYKGEETPVIVGSALCALEGRDPELGLKSVQKLLDAVDTYIPVPARDLEKPFLLPVEAVYSVPGRGTVVTGTLERGILKKGDECELLGHSKNIRTVVTGLGSQSGEQGLAEGWPYPGRSLVPSLCLTFAFLLPAPFPFPS

SEQ ID NO: 417 - protein, 452 aa, Homo sapiens
MAAATLLRATPHFSGLAAGRTFLLQGLLRLLKAPALPLLCRGLAVEAKKTYVRDKPHVNVGTIGHVDHGKTTLTAAITKILAEGGGAKFKKYEEIDNAPEERARGITINAAHVEYSTAARHYAHTDCPGHADYVKNMITGTAPLDGCILVVAANDGPMPQTREHLLLARQIGVEHVVVYVNKADAVQDSEMVELVELEIRELLTEFGYKGEETPVIVGSALCALEGRDPELGLKSVQKLLDAVDTYIPVPARDLEKPFLLPVEAVYSVPGRGTVVTGTLERGILKKGDECELLGHSKNIRTVVTGIEMFHKSLERAEAGDNLGALVRGLKREDLRRGLVMVKPGSIKPHQKVEAQVYILSKEEGGRHKPFVSHFMPVMFSLTWDMACRIILPPEKELAMPGEDLKFNLILRQPMILEKGQRFTLRDGNRTIGTGLVTNTLAMTEEEKNIKWG

SEQ ID NO: 418 - protein, 455 aa, Homo sapiens; identical to SEQ ID NO: 415

SEQ ID NO: 419 - protein, 1635 aa, Homo sapiens [sequence omitted]

SEQ ID NO: 420 - protein, 1656 aa, Homo sapiens [sequence omitted]

SEQ ID NO: 421 - protein, 2403 aa, Homo sapiens
MGISTVILEMCLLWGQVLSTGGWIPRTTDYASLIPSEVPLDTTVAEGSPFPSELTLESTAAEGSPISLESTLESTVAEGSLIPSESTLESTVAEGSDSGLALRLVNGDGRCQGRVEILYRGSWGTVCDDSWDTNDANVVCRQLGCGWAMSAPGNAWFGQGSGPIALDDVRCSGHESYLWSCPHNGWLSHNCGHGEDAGVICSAAQPQSTLRPESWPVRISPPVPTEGSESSLALRLVNGGDRCRGRVEVLYRGSWGTVCDDYWDTNDANVVCRQLGCGWAMSAPGNAQFGQGSGPIVLDDVRCSGHESYLWSCPHNGWLTHNCGHSEDAGVICSAPLSRPTPSPDTWPTSHASTAGPESSLALRLVNGGDRCQGRVEVLYRGSWGTVCDDSWDTSDANVVCRQLGCGWATSAPGNARFGQGSGPIVLDDVRCSGYESYLWSCPHNGWLSHNCQHSEDAGVICSDTLPTITLPASTVGSESSLALRLVNGGDRCQGRVEVLYRGSWGTVCDDSWDTNDANVVCRQLGCGWAMLAPGNARFGQGSGPIVLDDVRCSGNESYLWSCPHNGWLSHNCGHSEDAGVICSGPESSLALGLVNGGDRCQGRVEVLYRGSWGTVCDDSWDTNDANVVCRQLGCGWATSAPGNARFGQGSGPIVLDDVRCSGHESYLWSCPNNGWLSHNCGHHEDAGVICSAAQSRSTPRPDTLSTITLPPSTVGSESSLTLRLVNGSDRCQGRVEVLYRGSWGTVCDDSWDTNDANVVCRQLGCGWATSAPGNARFGQGSGPIVLDDVRCSGHESYLWSCPHNGWLSHNCGHHEDAGVICSVSQSRPTPSPDTWPTSHASTAGSESSLALRLVNGGDRCQGRVEVLYRGSWGTVCDDSWDTSDANVVCRRLGCGWATSAPGNARFGQGSGPIVLDDVRCSGYESYLWSCPHNGWLSHNCQHSEDAGVICSAAHSWSTPSPDTLPTITLPASTVGSESSLALRLVNGGDRCQGRVEVLYQGSWGTVCDDSWDTNDANVVCRQLGCGWAMSAPGNARFGQGSGPIVLDDVRCSGHESYLWSCPHNGWLSHNCGHSEDAGVICSASQSRPTPSPDTWPTSHASTAGSESSLALRLVNGGDRCQGRVEVLYRGSWGTVCDDYWDTNDANVVCRQLGCGWAMSAPGNARFGQGSGPIVLDDVRCSGHESYLWSCPHDGWLSHNCGHHEDAGVICSASQSQPTPSPDTWPTSHASTAGSESSLALRLVNGGDRCQGRVEVLYRGPWGTVCDDYWDTNDANVVCRQLGCGWATSAPGNARFGQGSGPIVLDDVRCSGHESYLWSCPHNGWLSHNCGHHEDAGVICSASQSQPTPSPDTWPTSHASTAGSESSLALRLVNGGDRCQGRVEVLYRGSWGTVCDDYWDTNDANVVCRQLGCGWATSAPGSARFGQGSGPIALDDVRCSGHESYLWSCPHNGWLSHNCGHHEDAGVICSASQSQPTPSPDTWPTSRASTAGSESTLALRLVNGGDRCRGRVEVLYQGSWGTVCDDYWDTNDANVVCRQLGCGWAMSAPGNAQFGQGSGPIVLDDVRCSGHESYLWSCPHNGWLSHNCGHHEDAGVICSAAQSQSTPRPDTWLTTNLPALTVGSESSLALRLVNGGDRCRGRVEVLYRGSWGTVCDDSWDTNDANVVCRQLGCGWAMSAPGNARFGQGSGPIVLDDVRCSGNESYLWSCPHKGWLTHNCGHHEDAGVICSATQINSTTTDWWHPTTTTTARPSSNCGGFLFYASGTFSSPSYPAYYPNNAKCVWEIEVNSGYRINLGFSNLKLEAHHNCSFDYVEIFDGSLNSSLLLGKICNDTRQIFTSSYNRMTIHFRSDISFQNTGFLAWYNSFPSDATLRLVNLNSSYGLCAGRVEIYHGGTWGTVCDDSWTIQEAEVVCRQLGCGRAVSALGNAYFGSGSGPITLDDVECSGTESTLWQCRNRGWFSHNCNHREDAGVICSGNHLSTPAPFLNITRPNTDYSCGGFLSQPSGDFSSPFYPGNYPNNAKCVWDIEVQNNYRVTVIFRDVQLEGGCNYDYIEVFDGPYRSSPLIARVCDGARGSFTSSSNFMSIRFISDHSITRRGFRAEYYSSPSNDSTNLLCLPNHMQASVSRSYLQSLGFSASDLVISTWNGYYECRPQITPNLVIFTIPYSGCGTFKQADNDTIDYSNFLTAAVSGGIIKRRTDLRIHVSCRMLQNTWVDTMYIANDTIHVANNTIQVEEVQYGNFDVNISFYTSSSFLYPVTSRPYYVDLNQDLYVQAEILHSDAVLTLFVDTCVASPYSNDFTSLTYDLIRSGCVRDDTYGPYSSPSLRIARFRFRAFHFLNRFPSVYLRCKMVVCRAYDPSSRCYRGCVLRSKRDVGSYQEKVDVVLGPIQLQTPPRREEEPR

SEQ ID NO: 422 - protein, 1657 aa, Homo sapiens [sequence omitted]

SEQ ID NO: 423 - protein, 2413 aa, Homo sapiens
MGISTVILEMCLLWGQVLSTGGWIPRTTDYASLIPSEVPLDQTVAEGSPFPSESTLESTAAEGSPISLESTLESTVAEGSLIPSESTLESTVAEGSDSGLALRLVNGDGRCQGRVEILYRGSWGTVCDDSWDTNDANVVCRQLGCGWAMSAPGNAWFGQGSGPIALDDVRCSGHESYLWSCPHNGWLSHNCGHGEDAGVICSAAQPQSTLRPESWPVRISPPVPTEGSESSLALRLVNGGDRCRGRVEVLYRGSWGTVCDDYWDTNDANVVCRQLGCGWAMSAPGNAQFGQGSGPIVLDDVRCSGHESYLWSCPHNGWLTHNCGHSEDAGVICSAPQSRPTPSPDTWPTSHASTAGPESSLALRLVNGGDRCQGRVEVLYRGSWGTVCDDSWDTSDANVVCRQLGCGWATSAPGNARFGQGSGPIVLDDVRCSGYESYLWSCPHNGWLSHNCQHSEDAGVICSAAHSWSTPSPDTLPTITLPASTVGSESSLALRLVNGGDRCQGRVEVLYRGSWGTVCDDSWDTNDANVVCRQLGCGWAMLAPGNARFGQGSGPIVLDDVRCSGNESYLWSCPHNGWLSHNCGHSEDAGVICSGPESSLALRLVNGGDRCQGRVEVLYRGSWGTVCDDSWDTNDANVVCRQLGCGWAMSAPGNARFGQGSGPIVLDDVRCSGHESYLWSCPNNGWLSHNCGHHEDAGVICSAAQSRSTPRPDTLSTITLPPSTVGSESSLTLRLVNGSDRCQGRVEVLYRGSWGTVCDDSWDTNDANVVCRQLGCGWAMSAPGNARFGQGSGPIVLDDVRCSGHESYLWSCPHNGWLSHNCGHHEDAGVICSVSQSRPTPSPDTWPTSHASTAGSESSLALRLVNGGDRCQGRVEVLYRGSWGTVCDDSWDTSDANVVCRQLGCGWATSAPGNARFGQGSGPIVLDDVRCSGYESYLWSCPHNGWLSHNCQHSEDAGVICSAAHSWSTPSPDTLPTITLPASTVGSESSLALRLVNGGDRCQGRVEVLYQGSWGTVCDDSWDTNDANVVCRQPGCGWAMSAPGNARFGQGSGPIVLDDVRCSGHESYPWSCPHNGWLSHNCGHSEDAGVICSASQSRPTPSPDTWPTSHASTAGSESSLALRLVNGGDRCQGRVEVLYRGSWGTVCDDYWDTNDANVVCRQLGCGWAMSAPGNARFGQGSGPIVLDDVRCSGHESYLWSCPHNGWLSHNCGHHEDAGVICSASQSQPTPSPDTWPTSHASTAGSESSLALRLVNGGDRCQGRVEVLYRGSWGTVCDDYWDTNDANVVCRQLGCGWATSAPGNARFGQGSGPIVLDDVRCSGHESYLWSCPHNGWLSHNCGHHEDAGVICSASQSQPTPSPDTWPTSHASTAGSESSLALRLVNGGDRCQGRVEVLYRGSWGTVCDDYWDTNDANVVCRQLGCGWATSAPGNARFGQGSGPIVLDDVRCSGHESYLWSCPHNGWLSHNCGHHEDAGVICSASQSQPTPSPDTWPTSRASTAGSESTLALRLVNGGDRCRGRVEVLYQGSWGTVCDDYWDTNDANVVCRQLGCGWAMSAPGNAQFGQGSGPIVLDDVRCSGHESYLWSCPHNGWLSHNCGHHEDAGVICSAAQSQSTPRPDTWLTTNLPALTVGSESSLALRLVNGGDRCRGRVEVLYRGSWGTVCDDSWDTNDANVVCRQLGCGWAMSAPGNARFGQGSGPIVLDDVRCSGNESYLWSCPHKGWLTHNCGHHEDAGVICSATQINSTTTDWWHPTTTTTARPSSNCGGFLFYASGTFSSPSYPAYYPNNAKCVWEIEVNSGYRINLGFSNLKLEAHHNCSFDYVEIFDGSLNSSLLLGKICNDTRQIFTSSYNRMTIHFRSDISFQNTGFLAWYNSFPSDATLRLVNLNSSYGLCAGRVEIYHGGTWGTVCDDSWTIQEAEVVCRQLGCGRAVSALGNAYFGSGSGPITLDDVECSGTESTLWQCRNRGWFSHNCNHREDAGVICSGNHLSTPAPFLNITRPNTDYSCGGFLSQPSGDFSSPFYPGNYPNNAKCVWDIEVQNNYRVTVIFRDVQLEGGCNYDYIEVFDGPYRSSPLIARVCDGARGSFTSSSNFMSIRFISDHSITRRGFRAEYYSSPSNDSTNLLCLPNHMQASVSRSYLQSLGFSASDLVISTWNGYYECRPQITPNLVIFTIPYSGCGTFKQADNDTIDYSNFLTAAVSGGIIKRRTDLRIHVSCRMLQNTWVDTMYIANDTIHVANNTIQVEEVQYGNFDVNISFYTSSSFLYPVTSRPYYVDLNQDLYVQAEILHSDAVLTLFVDTCVASPYSNDFTSLTYDLIRSGCVRDDTYGPYSSPSLRIARFRFRAFHFLNRFPSVYLRCKMVVCRAYDPSSRCYRGCVLRSKRDVGSYQEKVDVVLGPIQLQTPPRREEEPR

SEQ ID NO: 424 - protein, 1049 aa, Homo sapiens [sequence omitted]

SEQ ID NO: 425 - protein, 1110 aa, Homo sapiens
MGKNRMVLLGGAGSPGYKGFVHLGFFVVAVSSLLSVSAVTQAPEGRKKELRLAGGENNCSGRVELKIHEKWGTVCGNGWSMNEVSVVCQQLGCPTLIKAPGWANASAGSGDIWMDKVSCTGNESALWDCKHEGWGKHNCTHEQDAGVTCADGSNLEMRLVNSGDNRCSGRVEIKFQGKWGTVCDDNFSKDHASVICKQLGCGSAISFSGSAKLGAGSGQIWLDDLACNGNESAIWDCKHRGWGRHNCDHAEDVGVICLDGADLSLRLVDGVSKCSGRLEVRFQGEWGTVCDDSWDRRDASVVCKQLGCPTAITAIGRVNASEGSGPIWLDSISCEGHEPALWECKHQEWGKHYCNHKEDAGVTCSDGADLELRLVGGGSRCAGMVEVEIQKLTGKVCSRGWTLTDADVVCRQLGCGSALQTQSKIYSKTKTEATNTWLFPGSCSGNETSLWQCKNWQWGGLSCDHFEEAQVTCSGHRKPRLVGGEIPCSGRVEVKHGDTWGSVCDFDLSLEAAGVVCRELQCGTVVSILGGAHFGEGSGQIWGEEFQCSGDESHLSLCSVAPPLDRTCSHSRDVSIVCSRYIDIRLADGKSSCEGRVELKTLGAWGPLCSSHWDIEDAHVLCQQLKCGVALSTPGGAHFGKGAGQVWRHKFHCTGTEEHIGDCPMTALGTPMCSDGQVASVICSGNQSHTLLPCSSSSSVQTTSSTIAKDSDVPCIASGQLRLVGGGGRCAGRVEVYHEGSWGTICDDSWDLTDANVVCKQLDCGVAINATGSAYFGEGTGDIWLDEIDCSGKESHIWQCHSHGWGRHNCRHKEDAGVVCSEFMSLRLTNEAHRVNCTGRLEVFYNGTWGSIGSSNMSPTTVGVVCRQLGCADNGTVKPTSSDKTPTRPMWTDSVQCPKGVDTLWQCPSSPWKQRQASPSQESWIVCDDKIRLQEGHTDCSGRVEIWHRGSWGTVCDDSWDLNDAEVACKQLGCGQAVEALKEAAFGPGTGPIWLNEMKCRGNESSLWDCPARPWSHSDCGHKEDASVKCLPRMTLESQHGTGHSTLTALLVCGAILLVLLIAFLLWTLKRRQTQRLTVSSRGEVLIHQVQYQEMDSKTDDLDLLKSSGQ

SEQ ID NO: 426 - protein, 266 aa, Homo sapiens
MVCLKLPGGSCMTALTVTLMVLSSPLALAGDTRPRFLWQLKFECHFFNGTERVRLLERCIYNQEESVRFDSDVGEYRAVTELGRPDAEYWNSQKDLLEQRRAAVDTYCRHNYGVGESFTVQRRVEPKVTVYPSKTQPLQHHNLLVCSVSGFYPGSIEVRWFRNGQEEKAGVVSTGLIQNGDWTFQTLVMLETVPRSGEVYTCQVEHPSVTSPLTVEWRARSESAQSKMLSGVGGFVLGLLFLGAGLFIYFRNQKGHSGLQPTGFLS

SEQ ID NO: 427 - protein, 198 aa, Homo sapiens
GDTRPRFLWQPKRECHFFNGTERVRFLDRYFYNQEESVRFDSDVGEFRAVTELGRPDAEYWNSQKDILEQARAAVDTYCRHNYGVVESFTVQRRVQPKVTVYPSKTQPLQHHNLLVCSVSGFYPGSIEVRWFLNGQEEKAGGVSTGLIQDDWTFQTLVMLETVPRSGEVYTCQVEHPSVTSPLTVEWRARSESAQSKM

SEQ ID NO: 428 - protein, 266 aa, Homo sapiens [sequence omitted]

SEQ ID NO: 429 - protein, 266 aa, Homo sapiens [sequence omitted]

SEQ ID NO: 430 - protein, 266 aa, Homo sapiens [sequence omitted]

SEQ ID NO: 431 - protein, 266 aa, Homo sapiens [sequence omitted]

SEQ ID NO: 432 - protein, 266 aa, Homo sapiens [sequence omitted]

SEQ ID NO: 433 - protein, 181 aa, Homo sapiens
PARFLEQVKHECHFFNGTERVRFLDRYFYHQEEYVRFDSDVGEYRAVTELGRPDAEYWNSQKDLLEQKRAAVDTYCRHNYGVGESFTVQRRVYPEVTVYPAKTQPLQHHNLLVCSVNGFYPGSIEVRWFRNGQEEKTGVVSTGLIQNGDWTFQTLVMLETVPRSGEVYTCQVEHPSLTSPL

SEQ ID NO: 434 - protein, 266 aa, Homo sapiens [sequence omitted]

SEQ ID NO: 435 - protein, 266 aa, Homo sapiens
MVCLKLPGGSYMAKLTVTLMVLSSPLALAGDTRPRFLQQDKYECHFFNGTERVRFLHRDIYNQEEDLRFDSDVGEYRAVTELGRPDAEYWNSQKDFLEDRRAAVDTYCRHNYGVGESFTVQRRVEPKVTVYPARTQTLQHHNLLVCSVNGFYPGSIEVRWFRNSQEEKAGVVSTGLIQNGDWTFQTLVMLETVPRSGEVYTCQVEHPSVTSPLTVEWRAQSESAQSKMLSGVGGFVLGLLFLGAGLFIYFKNQKGHSGLHPTGLVS

SEQ ID NO: 436 - protein, 170 aa, Homo sapiens
PARFLEQVKHECHFFNGTERVRFLDRYFYHQEEYVRFDSDVGEYRAVTELGRPDAEYWNSQKDLLEQKRAAVDTYCRHNYGVGESFTVQRRVYPEVTVYPAKTQPLQHHNLLVCSVNGFYPGSIEVRWFRNGQEEKTGVVSTGLIQNGEVPRSGEVYTCQVEHPSLTSPL

SEQ ID NO: 437 - protein, 906 aa, Homo sapiens
MTAVHAGNINFKWDPKSLEIRTLAVERLLEPLVTQVTTLVNTNSKGPSNKKRGRSKKAHVLAASVEQATENFLEKGDKIAKESQFLKEELVAAVEDVRKQGDLMKAAAGEFADDPCSSVKRGNMVRAARALLSAVTRLLILADMADVYKLLVQLKVVEDGILKLRNAGNEQDLGIQYKALKPEVDKLNIMAAKRQQELKDVGHRDQMAAARGILQKNVPILYTASQACLQHPDVAAYKANRDLIYKQLQQAVTGISNAAQATASDDASQHQGGGGGELAYALNNFDKQIIVDPLSFSEERFRPSLEERLESIISGAALMADSSCTRDDRRERIVAECNAVRQALQDLLSEYMGNAGRKERSDALNSAIDKMTKKTRDLRRQLRKAVMDHVSDSFLETNVPLLVLIEAAKNGNEKEVKEYAQVFREHANKLIEVANLACSISNNEEGVKLVRMSASQLEALCPQVINAALALAAKPQSKLAQENMDLFKEQWEKQVRVLTDAVDDITSIDDFLAVSENHILEDVNKCVIALQEKDVDGLDRTAGAIRGRAARVIHVVTSEMDNYEPGVYTEKVLEATKLLSNTVMPRFTEQVEAAVEALSSDPAQPMDENEFIDASRLVYDGIRDIRKAVLMIRTPEELDDSDFETEDFDVRSRTSVQTEDDQLIAGQSARAIMAQLPQEQKAKIAEQVASFQEEKSKLDAEVSKWDDSGNDIIVLAKQMCMIMMEMTDFTRGKGPLKNTSDVISAAKKIAEAGSRMDKLGRTIADHCPDSACKQDLLAYLQRIALYCHQLNICSKVKAEVQNLGGELVVSGVDSAMSLIQAAKNLMNAVVQTVKASYVASTKYQKSQGMASLNLPAVSWKMKAPEKKPLVKREKQDETQTKIKRASQKKHVNPVQALSEFKAMDSI

SEQ ID NO: 438 - protein, 536 aa, Homo sapiens
MTKKTRDLRRQLRKAVMDHVSDSFLETNVPLLVLIEAAKNGNEKEVKEYAQVFREHANKLIEVANLACSISNNEEGVKLVRMSASQLEALCPQVINAALALAAKPQSKLAQENMDLFKEQWEKQVRVLTDAVDDITSIDDFLAVSENHILEDVNKCVIALQEKDVDGLDRTAGAIRGRAARVIHVVTSEMDNYEPGVYTEKVLEATKLLSNTVMPRFTEQVEAAVEALSSDPAQPMDENEFIDASRLVYDGIRDIRKAVLMIRTPEELDDSDFETEDFDVRSRTSVQTEDDQLIAGQSARAIMAQLPQEQKAKIAEQVASFQEEKSKLDAEVSKWDDSGNDIIVLAKQMCMIMMEMTDFTRGKGPLKNTSDVISAAKKIAEAGSRMDKLGRTIADHCPDSACKQDLLAYLQRIALYCHQLNICSKVKAEVQNLGGELVVSGVDSAMSLIQAAKNLMNAVVQTVKASYVASTKYQKSQGMASLNLPAVSWKMKAPEKKPLVKREKQDETQTKIKRASQKKHVNPVQALSEFKAMDSI

SEQ ID NO: 439 - protein, 906 aa, Homo sapiens; identical to SEQ ID NO: 437

SEQ ID NO: 440 - protein, 841 aa, Homo sapiens
MTAVHAGNINFKWDPKSLEIRTLAVERLLEPLVTQVTTLVNTNSKGPSNKKRGRSKKAHVLAASVEQATENFLEKGDKIAKESQFLKEELVAAVEDVRKQGDLMKAAAGEFADDPCSSVKRGNMVRAARALLSAVTRLLILADMADVYKLLVQLKVVEDGILKLRNAGNEQDLGIQYKALKPEVDKLNIMAAKRQQELKDVGHRDQMAAARGILQKNVPILYTASQACLQHPDVAAYKANRDLIYKQLQQAVTGISNAAQATASDDASQHQGGGGGELAYALNNFDKQIIVDPLSFSEERFRPSLEERLESIISGAALMADSSCTRDDRRERIVAECNAVRQALQDLLSEYMGNAGRKERSDALNSAIDKMTKKTRDLRRQLRKAVMDHVSDSFLETNVPLLVLIEAAKNGNEKEVKEYAQVFREHANKLIEVANLACSISNNEEGVKLVRMSASQLEALCPQVINAALALAAKPQSKLAQENMDLFKEQWEKQVRVLTDAVDDITSIDDFLAVSENHILEDVNKCVIALQEKDVDGLDRTAGAIRGRAARVIHVVTSEMDNYEPGVYTEKVLEATKLLSNTVMPRFTEQVEAAVEALSSDPAQPMDENEFIDASRLVYDGIRDIRKAVLMIRTPEELDDSDFETEDFDVRSRTSVQTEDDQLIAGQSARAIMAQLPQEQKAKIAEQVASFQEEKSKLDAEVSKWDDSGNDIIVLAKQMCMIMMEMTDFTRGKGPLKNTSDVISAAKKIAEAGSRMDKLGRTIADHCPDSACKQDLLAYLQRIALYCHQLNICSKVKAEVQNLGGELVVSGNCDTCGALQGLKGWPPPLCWPLTGWTAPCP

SEQ ID NO: 441 - protein, 375 aa, Homo sapiens
MSASAPAAEGEGTPTQPASEKEPEMPGPREESEEEEDEDDEEEEEEEKEKSLIVEGKREKKKVERLTMQVSSLQREPFTIAQGKGQKLCEIERIHFFLSKKKTDELRNLHKLLYNRPGTVSSLKKNVGQFSGFPFEKGSVQYKKKEEMLKKFRNAMLKSICEVLDLERSGVNSELVKRILNFLMHPKPSGKPLPKSKKTCSKGSKKERNSSGMARKAKRTKCPEILSDESSSDEDEKKNKEESSDDEDKESEEEPPKKTAKREKPKQKATSKSKKSVKSANVKKADSSTTKKNQNSSKKESESEDSSDDEPLIKKLKKPPTDEELKETIKKLLASANLEEVTMKQICKKVYENYPTYDLTERKDFIKTTVKELIS

SEQ ID NO: 442 - protein, 380 aa, Homo sapiens
MSASAPAAEGEGTPTQPASEKEPEMPGPREESEEEEDEDDEEEEEEEKEKSLIVEGKREKKKVERLTMQVSSLQREPFTIAQGKGQKLCEIERIHFFLSKKKTDELRNLHKLLYNRPGTVSSLKKNVGQFSGFPFEKGSVQYKKKEEMLKKFRNAMLKSICEVLDLERSGVNSELVKRILNFLMHPKPSGKPLPKSKKTCSKGSKKERNSSGMARKAKRTKCPEILSDESSSDEDEKKNKEESSDDEDKESEEEPPKKTAKREKPKQKATSKSKKSVKSANVKKADSSTTKKNQNSSKKESESEDSSDDEPLIKKLKKPPTDEELKETIKKLLASANLEEVTMKQICKKVYENYPTYDLTERKDFIKTTVKEVNISVFQV

SEQ ID NO: 443 - protein, 375 aa, Homo sapiens; identical to SEQ ID NO: 441

SEQ ID NO: 444 - protein, 375 aa, Homo sapiens; identical to SEQ ID NO: 441

SEQ ID NO: 445 - protein, 677 aa, Homo sapiens
MGVPFFSSLRCMVDLGPCWAGGLTAEMKLLLALAGLLAILATPQPSEGAAPAVLGEVDTSLVLSSMEEAKQLVDKAYKERRESIKQRLRSGSASPMELLSYFKQPVAATRTAVRAADYLHVALDLLERKLRSLWRRPFNVTDVLTPAQLNVLSKSSGCAYQDVGVTCPEQDKYRTITGMCNNRRSPTLGASNRAFVRWLPAEYEDGFSLPYGWTPGVKRNGFPVALARAVSNEIVRFPTDQLTPDQERSLMFMQWGQLLDHDLDFTPEPAARASFVTGVNCETSCVQQPPCFPLKIPPNDPRIKNQADCIPFFRSCPACPGSNITIRNQINALTSFVDASMVYGSEEPLARNLRNMSNQLGLLAVNQRFQDNGRALLPFDNLHDDPCLLTNRSARIPCFLAGDTRSSEMPELTSMHTLLLREHNRLATELKSLNPRWDGERLYQEARKIVGAMVQIITYRDYLPLVLGPTAMRKYLPTYRSYNDSVDPRIANVFTNAFRYGHTLIQPFMFRLDNRYQPMEPNPRVPLSRVFFASWRVVLEGGIDPILRGLMATPAKLNRQNQIAVDEIRERLFEQVMRIGLDLPALNMQRSRDHGLPGYNAWRRFCGLPQPETVGQLGTVLRNLKLARKLMEQYGTPNNIDIWMGGVSEPLKRKGRVGPLLACIIGTQFRKLRDGDR

SEQ ID NO: 446 - protein, 715 aa, Homo sapiens
MHLLPALAGVLATLVLAQPCEGTDPASPGAVETSVLRDCIAEAKLLVDAAYNWTQKSIKQRLRSGSASPMDLLSYFKQPVAATRTVVRAADYMHVALGLLEEKLQPQRSGPFNVTDVLTEPQLRLLSQASGCALRDQAERCSDKYRTITGRCNNKRRPLLGASNQALARWLPAEYEDGLSLPFGWTPSRRRNGFLLPLVRAVSNQIVRFPNERLTSDRGRALMFMQWGQFIDHDLDFSPESPARVAFTAGVDCERTCAQLPPCFPIKIPPNDPRIKNQRDCIPFFRSAPSCPQNKNRVRNQINALTSFVDASMVYGSEVSLSLRLRNRTNYLGLLAINQRFQDNGRALLPFDNLHDDPCLLTNRSARIPCFLAGDTRSTETPKLAAMHTLFMREHNRLATELRRLNPRWNGDKLYNEARKIMGAMVQIITYRDFLPLVLGKARARRTLGHYRGYCSNVDPRVANVFTLAFRFGHTMLQPFMFRLDSQYRASAPNSHVPLSSAFFASWRIVYEGGIDPILRGLMATPAKLNRQDAMLVDELRDRLFRQVRRIGLDLAALNMQRSRDHGLPGYNAWRRFCGLSQPRNLAQLSRVLKNQDLARKFLNLYGTPDNIDIWIGAIAEPLLPGARVGPLLACLFENQFRRARDGDRFWWQKRGVFTKRQRKALSRISLSRIICDNTGITTVSRDIFRANIYPRGFVNCSRIPRLNLSAWRGT

SEQ ID NO: 447 - protein, 715 aa, Homo sapiens; identical to SEQ ID NO: 446

SEQ ID NO: 448 - protein, 659 aa, Homo sapiens
MHLLPALAGVLATLVLAQPCEGTDPASPGAVETSVLRDCIAEAKLLVDAAYNWTQKSIKQRLRSGSASPMDLLSYFKQPVAATRTVVRAADYMHVALGLLEEKLQPQRSGPFNVTDVLTEPQLRLLSQASGCALRDQAERCSDKYRTITGRCNNKRRPLLGASNQALARWLPAEYEDGLSLPFGWTPSRRRNGFLLPLVRAVSNQIVRFPNERLTSDRGRALMFMQWGQFIDHDLDFSPESPARVAFTAGVDCERTCAQLPPCFPIKIPPNDPRIKNQRDCIPFFRSAPSCPQNKNRVRNQINALTSFVDASMVYGSEVSLSLRLRNRTNYLGLLAINQRFQDNGRALLPFDNLHDDPCLLTNRSARIPCFLAGDTRSTETPKLAAMHTLFMREHNRLATELRRLNPRWNGDKLYNEARKIMGAMVQIITYRDFLPLVLGKARARRTLGHYRGYCSNVDPRVANVFTLAFRFGHTMLQPFMFRLDSQYRASAPNSHVPLSSAFFASWRIVYEGDQVFQGANGGGIDPILRGLMATPAKLNRQDAMLVDELRDRLFRQVRRIGLDLAALNMQRSRDHGLPGYNAWRRFCGLSQPRNLAQLSRVLKNQDLARKFLNLYGTPDNIDIWIGAIAEPLLPGARVGPLLACLFENQFRRARDGDR

SEQ ID NO: 449 - protein, 715 aa, Homo sapiens; identical to SEQ ID NO: 446

SEQ ID NO: 450 - protein, 255 aa, Homo sapiens
MAAAEAANCIMEVSCGQAESSEKPNAEDMTSKDYYFDSYAHFGIHEEMLKDEVRTLTYRNSMFHNRHLFKDKVVLDVGSGTGILCMFAAKAGARKVIGIECSSISDYAVKIVKANKLDHVVTIIKGKVEEVELPVEKEVDIYTVKVEDLTFTSPFCLQVKRNDYVHALVAYFNIEFTRCHKRTGFSTSPESPYTHWKQTVFYMEDYLTVKTGEEIFGTIGMRPNAKNNRDLDFTIDLDFKGQLCELSCSTDYRMR

SEQ ID NO: 451 - protein, 856 aa, Homo sapiens
MALVLGSLLLLGLCGNSFSGGQPSSTDAPKAWNYELPATNYETQDSHKAGPIGILFELVHIFLYVVQPRDFPEDTLRKFLQKAYESKIDYDKIVYYEAGIILCCVLGLLFIILMPLVGYFFCMCRCCNKCGGEMHQRQKENGPFLRKCFAISLLVICIIISIGIFYGFVANHQVRTRIKRSRKLADSNFKDLRTLLNETPEQIKYILAQYNTTKDKAFTDLNSINSVLGGGILDRLRPNIIPVLDEIKSMATAIKETKEALENMNSTLKSLHQQSTQLSSSLTSVKTSLRSSLNDPLCLVHPSSETCNSIRLSLSQLNSNPELRQLPPVDAELDNVNNVLRTDLDGLVQQGYQSLNDIPDRVQRQTTTVVAGIKRVLNSIGSDIDNVTQRLPIQDILSAFSVYVNNTESYIHRNLPTLEEYDSYWWLGGLVICSLLTLIVIFYYLGLLCGVCGYDRHATPTTRGCVSNTGGVFLMVGVGLSFLFCWILMIIVVLTFVFGANVEKLICEPYTSKELFRVLDTPYLLNEDWEYYLSGKLFNKSKMKLTFEQVYSDCKKNRGTYGTLHLQNSFNISEHLNINEHTGSISSELESLKVNLNIFLLGAAGRKNLQDFAACGIDRMNYDSYLAQTGKSPAGVNLLSFAYDLEAKANSLPPGNLRNSLKRDAQTIKTIHQQRVLPIEQSLSTLYQSVKILQRTGNGLLERVTRILASLDFAQNFITNNTSSVIIEETKKYGRTIIGYFEHYLQWIEFSISEKVASCKPVATALDTAVDVFLCSYIIDPLNLFWFGIGKATVFLLPALIFAVKLAKYYRRMDSEDVYDDVETIPMKNMENGNNGYHKDHVYGIHNPVMTSPSQH

SEQ ID NO: 452 - protein, 865 aa, Homo sapiens
MALVLGSLLLLGLCGNSFSGGQPSSTDAPKAWNYELPATNYETQDSHKAGPIGILFELVHIFLYVVQPRDFPEDTLRKFLQKAYESKIDYDKPETVILGLKIVYYEAGIILCCVLGLLFIILMPLVGYFFCMCRCCNKCGGEMHQRQKENGPFLRKCFAISLLVICIIISIGIFYGFVANHQVRTRIKRSRKLADSNFKDLRTLLNETPEQIKYILAQYNTTKDKAFTDLNSINSVLGGGILDRLRPNIIPVLDEIKSMATAIKETKEALENMNSTLKSLHQQSTQLSSSLTSVKTSLRSSLNDPLCLVHPSSETCNSIRLSLSQLNSNPELRQLPPVDAELDNVNNVLRTDLDGLVQQGYQSLNDIPDRVQRQTTTVVAGIKRVLNSIGSDIDNVTQRLPIQDILSAFSVYVNNTESYIHRNLPTLEEYDSYWWLGGLVICSLLTLIVIFYYLGLLCGVCGYDRHATPTTRGCVSNTGGVFLMVGVGLSFLFCWILMIIVVLTFVFGANVEKLICEPYTSKELFRVLDTPYLLNEDWEYYLSGKLFNKSKMKLTFEQVYSDCKKNRGTYGTLHLQNSFNISEHLNINEHTGSISSELESLKVNLNIFLLGAAGRKNLQDFAACGIDRMNYDSYLAQTGKSPAGVNLLSFAYDLEAKANSLPPGNLRNSLKRDAQTIKTIHQQRVLPIEQSLSTLYQSVKILQRTGNGLLERVTRILASLDFAQNFITNNTSSVIIEETKKYGRTIIGYFEHYLQWIEFSISEKVASCKPVATALDTAVDVFLCSYIIDPLNLFWFGIGKATVFLLPALIFAVKLAKYYRRMDSEDVYDDVETIPMKNMENGNNGYHKDHVYGIHNPVMTSPSQH

SEQ ID NO: 453 - protein, 865 aa, Homo sapiens; identical to SEQ ID NO: 452

SEQ ID NO: 454 - protein, 865 aa, Homo sapiens; identical to SEQ ID NO: 452

SEQ ID NO: 455 - protein, 309 aa, Homo sapiens [sequence omitted]

SEQ ID NO: 456 - protein, 271 aa, Homo sapiens [sequence omitted]

SEQ ID NO: 457 - protein, 271 aa, Homo sapiens
MPEAPPLLLAAVLLGLVLLVVLLLLLRHWGWGLCLIGWNEFILQPIHNLLMGDTKEQRILNHVLQHAEPGNAQSVLEAIDTYCEQKEWAMNVGDKKGKIVDAVIQEHQPSVLLELGAYCGYSAVRMARLLSPGARLITIEINPDCAAITQRMVDFAGVKDKVTLVVGASQDIIPQLKKKYDVDTLDMVFLDHWKDRYLPDTLLLEECGLLRKGTVLLADNVICPGAPDFLAHVRGSSCFECTHYQSFLEYREVVDGLEKAIYKGPGSEAGP

SEQ ID NO: 458 - protein, 271 aa, Homo sapiens [sequence omitted]

SEQ ID NO: 459 - protein, 221 aa, Homo sapiens
MGDTKEQRILNHVLQHAEPGNAQSVLEAIDTYCEQKEWAMNVGDKKGKIVDAVIQEHQPSVLLELGAYCGYSAVRMARLLSPGARLITIEINPDCAAITQRMVDFAGVKDKVTLVVGASQDIIPQLKKKYDVDTLDMVFLDHWKDRYLPDTLLLEECGLLRKGTVLLADNVICPGAPDFLAHVRGSSCFECTHYQSFLEYREVVDGLEKAIYKGPGSEAGP

SEQ ID NO: 460 - protein, 1548 aa, Homo sapiens [sequence omitted]

SEQ ID NO: 461 - protein, 660 aa, Homo sapiens [sequence omitted]

SEQ ID NO: 462 - protein, 660 aa, Homo sapiens
MDVLVSECSARLLQQEEEIKSLTAEIDRLKNCGCLGASPNLEQLQEENLKLKYRLNILRKSLQAERNKPTKNMINIISRLQEVFGHAIKAAYPDLENPPLLVTPSQQAKFGDYQCNSAMGISQMLKTKEQKVNPREIAENITKHLPDNECIEKVEIAGPGFINVHLRKDFVSEQLTSLLVNGVQLPALGENKKVIVDFSSPNIAKEMHVGHLRSTIIGESISRLFEFAGYDVLRLNHVGDWGTQFGMLIAHLQDKFPDYLTVSPPIGDLQVFYKESKKRFDTEEEFKKRAYQCVVLLQGKNPDITKAWKLICDVSRQELNKIYDALDVSLIERGESFYQDRMNDIVKEFEDRGFVQVDDGRKIVFVPGCSIPLTIVKSDGGYTYDTSDLAAIKQRLFEEKADMIIYVVDNGQSVHFQTIFAAAQMIGWYDPKVTRVFHAGFGVVLGEDKKKFKTRSGETVRLMDLLGEGLKRSMDKLKEKERDKVLTAEELNAAQTSVAYGCIKYADLSHNRLNDYIFSFDKMLDDRGNTAAYLLYAFTRIRSIARLANIDEEMLQKAARETKILLDHEKEWKLGRCILRFPEILQKILDDLFLHTLCDYIYELATAFTEFYDSCYCVEKDRQTGKILKVNMWRMLLCEAVAAVMAKGFDILGIKPVQRM

SEQ ID NO: 463 - protein, 890 aa, Homo sapiens [sequence omitted]

SEQ ID NO: 464 - protein, 890 aa, Homo sapiens [sequence omitted]

SEQ ID NO: 465 - protein, 890 aa, Homo sapiens [sequence omitted]

SEQ ID NO: 466 - protein, 890 aa, Homo sapiens
MDSNTAPLGPSCPQPPPAPQPQARSRLNATASLEQERSERPRAPGPQAGPGPGVRDAAAPAEPQAQHTRSRERADGTGPTKGDMEIPFEEVLERAKAGDPKAQTEVGKHYLQLAGDTDEELNSCTAVDWLVLAAKQGRREAVKLLRRCLADRRGITSENEREVRQLSSETDLERAVRKAALVMYWKLNPKKKKQVAVAELLENVGQVNEHDGGAQPGPVPKSLQKQRRMLERLVSSESKNYIALDDFVEITKKYAKGVIPSSLFLQDDEDDDELAGKSPEDLPLRLKVVKYPLHAIMEIKEYLIDMASRAGMHWLSTIIPTHHINALIFFFIISNLTIDFFAFFIPLVIFYLSFISMVICTLKVFQDSKAWENFRTLTDLLLRFEPNLDVEQAEVNFGWNHLEPYAHFLLSVFFVIFSFPIASKDCIPCSELAVITGFFTVTSYLSLSTHAEPYTRRALATEVTAGLLSLLPSMPLNWPYLKVLGQTFITVPVGHLVVLNVSVPCLLYVYLLYLFFRMAQLRNFKGTYCYLVPYLVCFMWCELSVVILLESTGLGLLRASIGYFLFLFALPILVAGLALVGVLQFARWFTSLELTKIAVTVAVCSVPLLLRWWTKASFSVVGMVKSLTRSSMVKLILVWLTAIVLFCWFYVYRSEGMKVYNSTLTWQQYGALCGPRAWKETNMARTQILCSHLEGHRVTWTGRFKYVRVTDIDNSAESAINMLPFFIGDWMRCLYGEAYPACSPGNTSTAEEELCRLKLLAKHPCHIKKFDRYKFEITVGMPFSSGADGSRSREEDDVTKDIVLRASSEFKSVLLSLRQGSLIEFSTILEGRLGSKWPVFELKAISCLNCMAQLSPTRRHVKIEHDWRSTVHGAVKFAFDFFFFPFLSAA

SEQ ID NO: 467 - protein, 427 aa, Homo sapiens
MFFTCGPNEAMVVSGFCRSPPVMVAGGRVFVLPCIQQIQRISLNTLTLNVKSEKVYTRHGVPISVTGIAQVKIQGQNKEMLAAACQMFLGKTEAEIAHIALETLEGHQRAIMAHMTVEEIYKDRQKFSEQVFKVASSDLVNMGISVVSYTLKDIHDDQDYLHSLGKARTAQVQKDARIGEAEAKRDAGIREAKAKQEKVSAQYLSEIEMAKAQRDYELKKAAYDIEVNTRRAQADLAYQLQVAKTKQQIEEQRVQVQVVERAQQVAVQEQEIARREKELEARVRKPAEAERYKLERLAEAEKSQLIMQAEAEAASVRMRGEAEAFAIGARARAEAEQMAKKAEAFQLYQEAAQLDMLLEKLPQVAEEISGPLTSANKITLVSSGSGTMGAAKVTGEVLDILTRLPESVERLTGVSISQVNHKPLRTA

SEQ ID NO: 468 - protein, 429 aa, Homo sapiens
MFFTCGPNEAMVVSGFCRSPPVMVAGGRVFVLPCIQQIQRISLNTLTLNVKSEKVYTRHGVPISVTGIAQVKIQGQNKEMLAAACQMFLGKTEAEIAHIALETLEGHQRAIMAHMTVEEIYKDRQKFSEQVFKVASSDLVNMGISVVSYTLKDIHDDQDYLHSLGKARTAQVQKDARIGEAEAKRDAGIREAKAKQEKVSAQYLSEIEMAKAQRDYELKKAAYDIEVNTRRAQADLAYQLQVAKTKQQIEEQRVQVQVVERAQQVAVQEQEIARREKELEARVRKPAEAERYKLERLAEAEKSQLIMQAEAEAASVRMRGEAEAFAIGARARAEAEQMAKKAEAFQLYQEAAQLDMLLEKLPQVAEEISGPLTSANKITLVSSGSGTMGAAKVTGEVLDILTRLPESVERLTGVSISQVRSQVGAEENC

SEQ ID NO: 469 - protein, 427 aa, Homo sapiens; identical to SEQ ID NO: 467

SEQ ID NO: 470 - protein, 427 aa, Homo sapiens; identical to SEQ ID NO: 467

SEQ ID NO: 471 - protein, 208 aa, Homo sapiens
MLGLLVALLALGLAVFALLDVWYLVRLPCAVLRARLLQPRVRDLLAEQRFPGRVLPSDLDLLLHMNNARYLREADFARVAHLTRCGVLGALRELRAHTVLAASCARHRRSLRLLEPFEVRTRLLGWDDRAFYLEARFVSLRDGFVCALLRFRQHLLGTSPERVVQHLCQRRVEPPELPADLQHWISYNEASSQLLRMESGLSDVTKDQ

SEQ ID NO: 472 - protein, 230 aa, Homo sapiens
PAPRTPAPAPRTPQDPAPAAAAMLGLLVALLALGLAVFALLDVWYLVRLPCAVLRARLLQPRVRDLLAEQRFPGRVLPSDLDLLLHMNNARYLREADFARVAHLTRCGVLGALRELRAHTVLAASCARHRRSLRLLEPFEVRTRLLGWDDRAFYLEARFVSLRDGFVCALLRFRQHLLGTSPERVVQHLCQRRVEPPELPADLQHWISYNEASSQLLRMESGLSDVTKDQ

SEQ ID NO: 473 - protein, 277 aa, Homo sapiens
MFPFYSCWRTGLLLLLLAVAVRESWQTEEKTCDLVGEKGKESEKELALVKRLKPLFNKSFESTVGQGSDTYIYIFRVCREAGNHTSGAGLVQINKSNGKETVVGRLNETHIFNGSNWIMLIYKGGDEYDNHCGKEQRRAVVMISCNRHTLADNFNPVSEERGKVQDCFYLFEMDSSLACSPEISHLSVGSILLVTFASLVAVYVVGGFLYQRLVVGAKGMEQFPHLAFWQDLGNLVADGCDFVCRSKPRNVPAAYRGVGDDQLGEESEERDDHLLPM

SEQ ID NO: 474 - protein, 194 aa, Homo sapiens
MLIYKGGDEYDNHCGKEQRRAVVMISCNRHTLADNFNPVSEERGKVQDCFYLFEMDSSLACSPEISHLSVGSILLVTFASLVAVYVVGGFLYQRLVVGAKGMEQFPHLAFWQDLGNLVAACGFDLFFNLLERERKQKWDIEGSAVLCAGCGMLLHLSLLLAQGSVFLPTFLWGKVFNPLMLPSSCLGHVPRNLD

SEQ ID NO: 475 - protein, 277 aa, Homo sapiens; identical to SEQ ID NO: 473

SEQ ID NO: 476 - protein, 277 aa, Homo sapiens; identical to SEQ ID NO: 473

SEQ ID NO: 477 - protein, 277 aa, Homo sapiens; identical to SEQ ID NO: 473

SEQ ID NO: 478 - protein, 701 aa, Homo sapiens
MRDSGSKAATDAQDANQCCTSCEDNAPATSYCVECSEPLCETCVEAHQRVKYTKDHTVRSTGPAKSRDGERTVYCNVHKHEPLVLFCESCDTLTCRDCQLNAHKDHQYQFLEDAVRNQRKLLASLVKRLGDKHATLQKSTKEVRSSIRQVSDVQKRVQVDVKMAILQIMKELNKRGRVLVNDAQKVTEGQQERLERQHWTMTKIQKHQEHILRFASWALESDNNTALLLSKKLIYFQLHRALKMIVDPVEPHGEMKFQWDLNAWTKSAEAFGKIVAERPGTNSTGPAPMAPPRAPGPLSKQGSGSSQPMEVQEGYGFGSGDDPYSSAEPHVSGVKRSRSGEGEVSGLMRKVPRVSLERLDLDLTADSQPPVFKVFPGSTTEDYNLIVIERGAAAAATGQPGTAPAGTPGAPPLAGMAIVKEEETEAAIGAPPTATEGPETKPVLMALAEGPGAEGPRLASPSGSTSSGLEVVAPEGTSAPGGGPGTLDDSATICRVCQKPGDLVMCNQCEFCFHLDCHLPALQDVPGEEWSCSLCHVLPDLKEEDGSLSLDGADSTGVVAKLSPANQRKCERVLLALFCHEPCRPLHQLATDSTFSLDQPGGTLDLTLIRARLQEKLSPPYSSPQEFAQDVGRMFKQFNKLTEDKADVQSIIGLQRFFETRMNEAFGDTKFSAVLVEPPPMSLPGAGLSSQELSGGPGDGP

SEQ ID NO: 479 - protein, 753 aa, Homo sapiens
MAASAAAASAAAASAASGSPGPGEGSAGGEKRSTAPSAAASASASAAASSPAGGGAEALELLEHCGVCRERLRPEREPRLLPCLHSACSACLGPAAPAAANSSGDGGAAGDGTGPAKSRDGERTVYCNVHKHEPLVLFCESCDTLTCRDCQLNAHKDHQYQFLEDAVRNQRKLLASLVKRLGDKHATLQKSTKEVRSSIRQVSDVQKRVQVDVKMAILQIMKELNKRGRVLVNDAQKVTEGQQERLERQHWTMTKIQKHQEHILRFASWALESDNNTALLLSKKLIYFQLHRALKMIVDPVEPHGEMKFQWDLNAWTKSAEAFGKIVAERPGTNSTGPAPMAPPRAPGPLSKQGSGSSQPMEVQEGYGFGSGDDPYSSAEPHVSGVKRSRSGEGEVSGLMRKVPRVSLERLDLDLTADSQPPVFKVFPGSTTEDYNLIVIERGAAAAATGQPGTAPAGTPGAPPLAGMAIVKEEETEAAIGAPPTATEGPETKPVLMALAEGPGAEGPRLASPSGSTSSGLEVVAPEGTSAPGGGPGTLDDSATICRVCQKPGDLVMCNQCEFCFHLDCHLPALQDVPGEEWSCSLCHVLPDLKEEDGSLSLDGADSTGVVAKLSPANQRKCERVLLALFCHEPCRPLHQLATDSTFSLDQPGGTLDLTLIRARLQEKLSPPYSSPQEFAQDVGRMFKQFNKLTEDKADVQSIIGLQRFFETRMNEAFGDTKFSAVLVEPPPMSLPGAGLSSQELSGGPGDGP

SEQ ID NO: 480 - protein, 835 aa, Homo sapiens
MAASAAAASAAAASAASGSPGPGEGSAGGEKRSTAPSAAASASASAAASSPAGGGAEALELLEHCGVCRERLRPEREPRLLPCLHSACSACLGPAAPAAANSSGDGGAAGDGTVVDCPVCKQQCFSKDIVENYFMRDSGSKAATDAQDANQCCTSCEDNAPATSYCVECSEPLCETCVEAHQRVKYTKDHTVRSTGPAKSRDGERTVYCNVHKHEPLVLFCESCDTLTCRDCQLNAHKDHQYQFLEDAVRNQRKLLASLVKRLGDKHATLQKSTKEVRSSIRQVSDVQKRVQVDVKMAILQIMKELNKRGRVLVNDAQKVTEGQQERLERQHWTMTKIQKHQEHILRFASWALESDNNTALLLSKKLIYFQLHRALKMIVDPVEPHGEMKFQWDLNAWTKSAEAFGKIVAERPGTNSTGPAPMAPPRAPGPLSKQGSGSSQPMEVQEGYGFGSGDDPYSSAEPHVSGVKRSRSGEGEVSGLMRKVPRVSLERLDLDLTADSQPPVFKVFPGSTTEDYNLIVIERGAAAAATGQPGTAPAGTPGAPPLAGMAIVKEEETEAAIGAPPTATEGPETKPVLMALAEGPGAEGPRLASPSGSTSSGLEVVAPEGTSAPGGGPGTLDDSATICRVCQKPGDLVMCNQCEFCFHLDCHLPALQDVPGEEWSCSLCHVLPDLKEEDGSLSLDGADSTGVVAKLSPANQRKCERVLLALFCHEPCRPLHQLATDSTFSLDQPGGTLDLTLIRARLQEKLSPPYSSPQEFAQDVGRMFKQFNKLTEDKADVQSIIGLQRFFETRMNEAFGDTKFSAVLVEPPPMSLPGAGLSSQELSGGPGDGP

SEQ ID NO: 481 - protein, 835 aa, Homo sapiens; identical to SEQ ID NO: 480

SEQ ID NO: 482 - protein, 199 aa, Homo sapiens
MSSGNAKIGHPAPNFKATAVMPDGQFKDISLSDYKGKYVVFFFYPLDFTFVCPTEIIAFSDRAEEFKKLNCQVIGASVDSHFCHLAWVNTPKKQGGLGPMNIPLVSDPKRTIAQDYGVLKADEGISFRGLFIIDDKGILRQITVNDLPVGRSVDETLRLVQAFQFTDKHGEVCPAGWKPGSDTIKPDVQKSKEYFSKQK

SEQ ID NO: 483 - protein, 199 aa, Homo sapiens; identical to SEQ ID NO: 482

SEQ ID NO: 484 - protein, 199 aa, Homo sapiens; identical to SEQ ID NO: 482

SEQ ID NO: 485 - protein, 199 aa, Homo sapiens; identical to SEQ ID NO: 482

SEQ ID NO: 486 - protein, 199 aa, Homo sapiens; identical to SEQ ID NO: 482

SEQ ID NO: 487 - protein, 199 aa, Homo sapiens; identical to SEQ ID NO: 482

SEQ ID NO: 488 - protein, 199 aa, Homo sapiens; identical to SEQ ID NO: 482

SEQ ID NO: 489 - protein, 254 aa, Homo sapiens
MAISGVPVLGFFIIAVLMSAQESWAIKEEHVIIQAEFYLNPDQSGEFMFDFDGDEIFHVDMAKKETVWRLEEFGRFASFEAQGALANIAVDKANLEIMTKRSNYTPITNVPPEVTVLTNSPVELREPNVLICFIDKFTPPVVNVTWLRNGKPVTTGVSETVFLPREDHLFRKFHYLPFLPSTEDVYDCRVEHWGLDEPLLKHWEFDAPSPLPETTENVVCALGLTVGLVGIIIGTIFIIKGVRKSNAAERRGPL

SEQ ID NO: 490 - protein, 254 aa, Homo sapiens; identical to SEQ ID NO: 489

SEQ ID NO: 491 - protein, 268 aa, Homo sapiens
MAISGVPVLGFFIIAVLMSAQESWAIKEEHVIIQAEFYLNPDQSGEFMFDFDGDEIFHVDMAKKETVWRLEEFGRFASFEAQGALANIAVDKANLEIMTKRSNYTPITNVPPEVTVLTNSPVELREPNVLICFIDKFTPPVVNVTWLRNGKPVTTGVSETVFLPREDHLFRKFHYLPFLPSTEDVYDCRVEHWGLDEPLLKHWEFDAPSPLPETTENVVCALGLTVGLVGIIIGTIFIIKGVMVFLREKITEETSALMTLQSWQYYNP

SEQ ID NO: 492 - protein, 207 aa, Homo sapiens [sequence omitted]

SEQ ID NO: 493 - protein, 881 aa, Homo sapiens
MAAPGAPAEYGYIRTVLGQQILGQLDSSSLALPSEAKLKLAGSSGRGGQTVKSLRIQEQVQQTLARKGRSSVGNGNLHRTSSVPEYVYNLHLVENDFVGGRSPVPKTYDMLKAGTTATYEGRWGRGTAQYSSQKSVEERSLRHPLRRLEISPDSSPERAHYTHSDYQYSQRSQAGHTLHHQESRRAALLVPPRYARSEIVGVSRAGTTSRQRHFDTYHRQYQHGSVSDTVFDSIPANPALLTYPRPGTSRSMGNLLEKENYLTAGLTVGQVRPLVPLQPVTQNRASRSSWHQSSFHSTRTLREAGPSVAVDSSGRRAHLTVGQAAAGGSGNLLTERSTFTDSQLGNADMEMTLERAVSMLEADHMPPSRISAAATFIQHECFQKSEARKRVNQLRGILKLLQLLKVQNEDVQRAVCGALRNLVFEDNDNKLEVAELNGVPRLLQVLKQTRDLETKKQITDHTVNLRSRNGWPGAVAHACNPSTLGGQGGRITRSGVRDQPDQHGLLWNLSSNDKLKNLMITEALLTLTENIIIPFSGWPEGDYPKANGLLDFDIFYNVTGCLRNMSSAGADGRKAMRRCDGLIDSLVHYVRGTIADYQPDDKATENCVCILHNLSYQLEAELPEKYSQNIYIQNRNIQTDNNKSIGCFGSRSRKVKEQYQDVPMPEEKSNPKGVEWLWHSIVIRMYLSLIAKSVRNYTQEASLGALQNLTAGSGPMPTSVAQTVVQKESGLQHTRKMLHVGDPSVKKTAISLLRNLSRNLSLQNEIAKETLPDLVSIIPDTVPSTDLLIETTASACYTLNNIIQNSYQNARDLLNTGGIQKIMAISAGDAYASNKASKAASVLLYSLWAHTELHHAYKKAQFKKTDFVNSRTAKAYHSLKD

SEQ ID NO: 494 - protein, 595 aa, Homo sapiens
MAAPGAPAEYGYIRTVLGQQILGQLDSSSLALPSEAKLKLAGSSGRGGQTVKSLRIQEQVQQTLARKGRSSVGNGNLHRTSSVPEYVYNLHLVENDFVGGRSPVPKTYDMLKAGTTATYEGRWGRGTAQYSSQKSVEERSLRHPLRRLEISPDSSPERAHYTHSDYQYSQRSQAGHTLHHQESRRAALLVPPRYARSEIVGVSRAGTTSRQRHFDTYHRQYQHGSVSDTVFDSIPANPALLTYPRPGTSRSMGNLLEKENYLTAGLTVGQVRPLVPLQPVTQNRASRSSWHQSSFHSTRTLREAGPSVAVDSSGRRAHLTVGQAAAGGSGNLLTERSTFTDSQLGNADMEMTLERAVSMLEADHMLPSRISAAATFIQHECFQKSEARKRVNQLRGILKLLQLLKVQNEDVQRAVCGALRNLVFEDNDNKLEVAELNGVPRLLQVLKQTRDLETKKQITGLLWNLSSNDKLKNLMITEALLTLTENIIIPFSGWPEGDYPKANGLLDFDIFYNVTGCLRNMSSAGADGRKAMRRCDGLIDSLVHYVRGTIADYQPDDKATENCVCILHNLNTRTCRCRRKRATPRAWSGCGIPLL

SEQ ID NO: 495 - protein, 881 aa, Homo sapiens
MAAPGAPAEYGYIRTVLGQQILGQLDSSSLALPSEAKLKLAGSSGRGGQTVKSLRIQEQVQQTLARKGRSSVGNGNLHRTSSVPEYVYNLHLVENDFVGGRSPVPKTYDMLKAGTTATYEGRWGRGTAQYSSQKSVEERSLRHPLRRLEISPDSSPERAHYTHSDYQYSQRSQAGHTLHHQESRRAALLVPPRYARSEIVGVSRAGTTSRQRHFDTYHRQYQHGSVSDTVFDSIPANPALLTYPRPGTSRSMGNLLEKENYLTAGLTVGQVRPLVPLQPVTQNRASRSSWHQSSFHSTRTLREAGPSVAVDSSGRRAHLTVGQAAAGGSGNLLTERSTFTDSQLGNADMEMTLERAVSMLEADHMLPSRISAAATFIQHECFQKSEARKRVNQLRGILKLLQLLKVQNEDVQRAVCGALRNLVFEDNDNKLEVAELNGVPRLLQVLKQTRDLETKKQITDHTVNLRSRNGWPGAVAHACNPSTLGGQGGRITRSGVRDQPDQHGLLWNLSSNDKLKNLMITEALLTLTENIIIPFSGWPEGDYPKANGLLDFDIFYNVTGCLRNMSSAGADGRKAMRRCDGLIDSLVHYVRGTIADYQPDDKATENCVCILHNLSYQLEAELPEKYSQNIYIQNRNIQTDNNKSIGCFGSRSRKVKEQYQDVPMPEEKSNPKGVEWLWHSIVIRMYLSLIAKSVRNYTQEASLGALQNLTAGSGPMPTSVAQTVVQKESGLQHTRKMLHVGDPSVKKTAISLLRNLSRNLSLQNEIAKETLPDLVSIIPDTVPSTDLLIETTASACYTLNNIIQNSYQNARDLLNTGGIQKIMAISAGDAYASNKASKAASVLLYSLWAHTELHHAYKKAQFKKTDFVNSRTAKAYHSLKD

SEQ ID NO: 496 - protein, 837 aa, Homo sapiens
MAAPGAPAEYGYIRTVLGQQILGQLDSSSLALPSEAKLKLAGSSGRGGQTVKSLRIQEQVQQTLARKGRSSVGNGNLHRTSSVPEYVYNLHLVENDFVGGRSPVPKTYDMLKAGTTATYEGRWGRGTAQYSSQKSVEERSLRHPLRRLEISPDSSPERAHYTHSDYQYSQRSQAGHTLHHQESRRAALLVPPRYARSEIVGVSRAGTTSRQRHFDTYHRQYQHGSVSDTVFDSIPANPALLTYPRPGTSRSMGNLLEKENYLTAGLTVGQVRPLVPLQPVTQNRASRSSWHQSSFHSTRTLREAGPSVAVDSSGRRAHLTVGQAAAGGSGNLLTERSTFTDSQLGNADMEMTLERAVSMLEADHMLPSRISAAATFIQHECFQKSEARKRVNQLRGILKLLQLLKVQNEDVQRAVCGALRNLVFEDNDNKLEVAELNGVPRLLQVLKQTRDLETKKQITGLLWNLSSNDKLKNLMITEALLTLTENIIIPFSGWPEGDYPKANGLLDFDIFYNVTGCLRNMSSAGADGRKAMRRCDGLIDSLVHYVRGTIADYQPDDKATENCVCILHNLSYQLEAELPEKYSQNIYIQNRNIQTDNNKSIGCFGSRSRKVKEQYQDVPMPEEKSNPKGVEWLWHSIVIRMYLSLIAKSVRNYTQEASLGALQNLTAGSGPMPTSVAQTVVQKESGLQHTRKMLHVGDPSVKKTAISLLRNLSRNLSLQNEIAKETLPDLVSIIPDTVPSTDLLIETTASACYTLNNIIQNSYQNARDLLNTGGIQKIMAISAGDAYASNKASKAASVLLYSLWAHTELHHAYKKAQFKKTDFVNSRTAKAYHSLKD

SEQ ID NO: 497 - protein, 881 aa, Homo sapiens; identical to SEQ ID NO: 495

SEQ ID NO: 498 - protein, 826 aa, Homo sapiens
MAEPSAPESKHKSSLNSSPWSGLMALGNSRHGHHGPGAQCAHKAAGGAAPPKPAPAGLSGGLSQPAGWQSLLSFTILFLAWLAGFSSRLFAVIRFESIIHEFDPWFNYRSTHHLASHGFYEFLNWFDERAWYPLGRIVGGTVYPGLMITAGLIHWILNTLNITVHIRDVCVFLAPTFSGLTSISTFLLTRELWNQGAGLLAACFIAIVPGYISRSVAGSFDNEGIAIFALQFTYYLWVKSVKTGSVFWTMCCCLSYFYMVSAWGGYVFIINLIPLHVFVLLLMQRYSKRVYIAYSTFYIVGLILSMQIPFVGFQPIRTSEHMAAAGVFALLQAYAFLQYLRDRLTKQEFQTLFFLGVSLAAGAVFLSVIYLTYTGYIAPWSGRFYSLWDTGYAKIHIPIIASVSEHQPTTWVSFFFDLHILVCTFPAGLWFCIKNINDERVFVALYAISAVYFAGVMVRLMLTLTPVVCMLSAIAFSNVFEHYLGDDMKRENPPVEDSSDEDDKRNQGNLYDKAGKVRKHATEQEKTEEGLGPNIKSIVTMLMLMLLMMFAVHCTWVTSNAYSSPSVVLASYNHDGTRNILDDFREAYFWLRQNTDEHARVMSWWDYGYQIAGMANRTTLVDNNTWNNSHIALVGKAMSSNETAAYKIMRTLDVDYVLVIFGGVIGYSGDDINKFLWMVRIAEGEHPKDIRESDYFTPQGEFRVDKAGSPTLLNCLMYKMSYYRFGEMQLDFRTPPGFDRTRNAEIGNKDIKFKHLEEAFTSEHWLVRIYKVKAPDNRETLDHKPRVTNIFPKQKYLSKKTTKRKRGYIKNKLVFKKGKKISKKTV

SEQ ID NO: 499 - protein, 826 aa, Homo sapiens; identical to SEQ ID NO: 498

SEQ ID NO: 500 - protein, 91 aa, Homo sapiens
MKCRRLSEKLSRKRKCILPKGLKLYLSKCTKLPKRLSLKRKCRWCLLKSLKSHLLKCQKLPKRLSAKRKCPWLLLKSLKSHLLKYQSLPKK

SEQ ID NO: 501 - protein, 91 aa, Homo sapiens; identical to SEQ ID NO: 500

SEQ ID NO: 502 - protein, 801 aa, Homo sapiens
MNLQPIFWIGLISSVCCVFAQTDENRCLKANAKSCGECIQAGPNCGWCTNSTFLQEGMPTSARCDDLEALKKKGCPPDDIENPRGSKDIKKNKNVTNRSKGTAEKLKPEDITQIQPQQLVLRLRSGEPQTFTLKFKRAEDYPIDLYYLMDLSYSMKDDLENVKSLGTDLMNEMRRITSDFRIGFGSFVEKTVMPYISTTPAKLRNPCTSEQNCTSPFSYKNVLSLTNKGEVFNELVGKQRISGNLDSPEGGFDAIMQVAVCGSLIGWRNVTRLLVFSTDAGFHFAGDGKLGGIVLPNDGQCHLENNMYTMSHYYDYPSIAHLVQKLSENNIQTIFAVTEEFQPVYKELKNLIPKSAVGTLSANSSNVIQLIIDAYNSLSSEVILENGKLSEGVTISYKSYCKNGVNGTGENGRKCSNISIGDEVQFEISITSNKCPKKDSDSFKIRPLGFTEEVEVILQYICECECQSEGIPESPKCHEGNGTFECGACRCNEGRVGRHCECSTDEVNSEDMDAYCRKENSSEICSNNGECVCGQCVCRKRDNTNEIYSGKFCECDNFNCDRSNGLICGGNGVCKCRVCECNPNYTGSACDCSLDTSTCEASNGQICNGRGICECGVCKCTDPKFQGQTCEMCQTCLGVCAEHKECVQCRAFNKGEKKDTCTQECSYFNITKVESRDKLPQPVQPDPVSHCKEKDVDDCWFYFTYSVNGNNEVMVHVVENPECPTGPDIIPIVAGVVAGIVLIGLALLLIWKLLMIIHDRREFAKFEKEKMNAKWDTQENPIYKSPINNFKNPNYGRKAGL

SEQ ID NO: 503 - protein, 798 aa, Homo sapiens [sequence omitted]

SEQ ID NO: 504 - protein, 798 aa, Homo sapiens
MNLQPIFWIGLISSVCCVFAQTDENRCLKANAKSCGECIQAGPNCGWCTNSTFLQEGMPTSARCDDLEALKKKGCPPDDIENPRGSKDIKKNKNVTNRSKGTAEKLKPEDITQIQPQQLVLRLRSGEPQTFTLKFKRAEDYPIDLYYLMDLSYSMKDDLENVKSLGTDLMNEMRRITSDFRIGFGSFVEKTVMPYISTTPAKLRNPCTSEQNCTSPFSYKNVLSLTNKGEVFNELVGKQRISGNLDSPEGGFDAIMQVAVCGSLIGWRNVTRLLVFSTDAGFHFAGDGKLGGIVLPNDGQCHLENNMYTMSHYYDYPSIAHLVQKLSENNIQTIFAVTEEFQPVYKELKNLIPKSAVGTLSANSSNVIQLIIDAYNSLSSEVILENGKLSEGVTISYKSYCKNGVNGTGENGRKCSNISIGDEVQFEISITSNKCPKKDSDSFKIRPLGFTEEVEVILQYICECECQSEGIPESPKCHEGNGTFECGACRCNEGRVGRHCECSTDEVNSEDMDAYCRKENSSEICSNNGECVCGQCVCRKRDNTNEIYSGKFCECDNFNCDRSNGLICGGNGVCKCRVCECNPNYTGSACDCSLDTSTCEASNGQICNGRGICECGVCKCTDPKFQGQTCEMCQTCLGVCAEHKECVQCRAFNKGEKKDTCTQECSYFNITKVESRDKLPQPVQPDPVSHCKEKDVDDCWFYFTYSVNGNNEVMVHVVENPECPTGPDIIPIVAGVVAGIVLIGLALLLIWKLLMIIHDRREFAKFEKEKMNAKWDTGENPIYKSAVTTVVNPKYEGK

SEQ ID NO: 505 - protein, 798 aa, Homo sapiens; identical to SEQ ID NO: 504

SEQ ID NO: 506 - protein, 798 aa, Homo sapiens; identical to SEQ ID NO: 504

SEQ ID NO: 507 - protein, 819 aa, Homo sapiens
MNLQPIFWIGLISSVCCVFAQTDENRCLKANAKSCGECIQAGPNCGWCTNSTFLQEGMPTSARCDDLEALKKKGCPPDDIENPRGSKDIKKNKNVTNRSKGTAEKLKPEDITQIQPQQLVLRLRSGEPQTFTLKFKRAEDYPIDLYYLMDLSYSMKDDLENVKSLGTDLMNEMRRITSDFRIGFGSFVEKTVMPYISTTPAKLRNPCTSEQNCTSPFSYKNVLSLTNKGEVFNELVGKQRISGNLDSPEGGFDAIMQVAVCGSLIGWRNVTRLLVFSTDAGFHFAGDGKLGGIVLPNDGQCHLENNMYTMSHYYDYPSIAHLVQKLSENNIQTIFAVTEEFQPVYKELKNLIPKSAVGTLSANSSNVIQLIIDAYNSLSSEVILENGKLSEGVTISYKSYCKNGVNGTGENGRKCSNISIGDEVQFEISITSNKCPKKDSDSFKIRPLGFTEEVEVILQYICECECQSEGIPESPKCHEGNGTFECGACRCNEGRVGRHCECSTDEVNSEDMDAYCRKENSSEICSNNGECVCGQCVCRKRDNTNEIYSGKFCECDNFNCDRSNGLICGGNGVCKCRVCECNPNYTGSACDCSLDTSTCEASNGQICNGRGICECGVCKCTDPKFQGQTCEMCQTCLGVCAEHKECVQCRAFNKGEKKDTCTQECSYFNITKVESRDKLPQPVQPDPVSHCKEKDVDDCWFYFTYSVNGNNEVMVHVVENPECPTGPDIIPIVAGVVAGIVLIGLALLLIWKLLMIIHDRREFAKFEKEKMNAKWDTPGVQWCDISSLQPLTSRFQQFSCLSLPSTWDYRVKILFIRVP

SEQ ID NO: 508 - protein, 789 aa, Homo sapiens
MNLQPIFWIGLISSVCCVFAQTDENRCLKANAKSCGECIQAGPNCGWCTNSTFLQEGMPTSARCDDLEALKKKGCPPDDIENPRGSKDIKKNKNVTNRSKGTAEKLKPEDITQIQPQQLVLRLRSGEPQTFTLKFKRAEDYPIDLYYLMDLSYSMKDDLENVKSLGTDLMNEMRRITSDFRIGFGSFVEKTVMPYISTTPAKLRNPCTSEQNCTSPFSYKNVLSLTNKGEVFNELVGKQRISGNLDSPEGGFDAIMQVAVCGSLIGWRNVTRLLVFSTDAGFHFAGDGKLGGIVLPNDGQCHLENNMYTMSHYYDYPSIAHLVQKLSENNIQTIFAVTEEFQPVYKELKNLIPKSAVGTLSANSSNVIQLIIDAYNSLSSEVILENGKLSEGVTISYKSYCKNGVNGTGENGRKCSNISIGDEVQFEISITSNKCPKKDSDSFKIRPLGFTEEVEVILQYICECECQSEGIPESPKCHEGNGTFECGACRCNEGRVGRHCECSTDEVNSEDMDAYCRKENSSEICSNNGECVCGQCVCRKRDNTNEIYSGKFCECDNFNCDRSNGLICGGNGVCKCRVCECNPNYTGSACDCSLDTSTCEASNGQICNGRGICECGVCKCTDPKFQGQTCEMCQTCLGVCAEHKECVQCRAFNKGEKKDTCTQECSYFNITKVESRDKLPQPVQPDPVSHCKEKDVDDCWFYFTYSVNGNNEVMVHVVENPECPTGPDIIPIVAGVVAGIVLIGLALLLIWKLLMIIHDRREFAKFEKEKMNAKWDTVSYKTSKKQSGL

SEQ ID NO: 509 - protein, 801 aa, Homo sapiens; identical to SEQ ID NO: 502

SEQ ID NO: 510 - protein, 819 aa, Homo sapiens; identical to SEQ ID NO: 507

SEQ ID NO: 511 - protein, 825 aa, Homo sapiens
MNLQPIFWIGLISSVCCVFAQTDENRCLKANAKSCGECIQAGPNCGWCTNSTFLQEGMPTSARCDDLEALKKKGCPPDDIENPRGSKDIKKNKNVTNRSKGTAEKLKPEDITQIQPQQLVLRLRSGEPQTFTLKFKRAEDYPIDLYYLMDLSYSMKDDLENVKSLGTDLMNEMRRITSDFRIGFGSFVEKTVMPYISTTPAKLRNPCTSEQNCTSPFSYKNVLSLTNKGEVFNELVGKQRISGNLDSPEGGFDAIMQVAVCGSLIGWRNVTRLLVFSTDAGFHFAGDGKLGGIVLPNDGQCHLENNMYTMSHYYDYPSIAHLVQKLSENNIQTIFAVTEEFQPVYKELKNLIPKSAVGTLSANSSNVIQLIIDAYNSLSSEVILENGKLSEGVTISYKSYCKNGVNGTGENGRKCSNISIGDEVQFEISITSNKCPKKDSDSFKIRPLGFTEEVEVILQYICECECQSEGIPESPKCHEGNGTFECGACRCNEGRVGRHCECSTDEVNSEDMDAYCRKENSSEICSNNGECVCGQCVCRKRDNTNEIYSGKFCECDNFNCDRSNGLICGGNGVCKCRVCECNPNYTGSACDCSLDTSTCEASNGQICNGRGICECGVCKCTDPKFQGQTCEMCQTCLGVCAEHKECVQCRAFNKGEKKDTCTQECSYFNITKVESRDKLPQPVQPDPVSHCKEKDVDDCWFYFTYSVNGNNEVMVHVVENPECPTGPDIIPIVAGVVAGIVLIGLALLLIWKLLMIIHDRREFAKFEKEKMNAKWDTSLSVAQPGVQWCDISSLQPLTSRFQQFSCLSLPSTWDYRVKILFIRVP

SEQ ID NO: 512 - protein, 789 aa, Homo sapiens; identical to SEQ ID NO: 508

SEQ ID NO: 513 - protein, 801 aa, Homo sapiens; identical to SEQ ID NO: 502

SEQ ID NO: 514 - protein, 819 aa, Homo sapiens; identical to SEQ ID NO: 507

SEQ ID NO: 515 - protein, 801 aa, Homo sapiens; identical to SEQ ID NO: 502

SEQ ID NO: 516 - protein, 819 aa, Homo sapiens; identical to SEQ ID NO: 507

SEQ ID NO: 517 - protein, 798 aa, Homo sapiens; identical to SEQ ID NO: 504

SEQ ID NO: 518 - protein, 825 aa, Homo sapiens; identical to SEQ ID NO: 511

SEQ ID NO: 519 - protein, 798 aa, Homo sapiens; identical to SEQ ID NO: 504

SEQ ID NO: 520 - protein, 798 aa, Homo sapiens; identical to SEQ ID NO: 504

SEQ ID NO: 521 - protein, 789 aa, Homo sapiens; identical to SEQ ID NO: 508

SEQ ID NO: 522 - protein, 682 aa, Homo sapiens
MPTSARCDDLEALKKKGCPPDDIENPRGSKDIKKNKNVTNRSKGTAEKLKPEDITQIQPQQLVLRLRSGEPQTFTLKFKRAEDYPIDLYYLMDLSYSMKDDLENVKSLGTDLMNEMRRITSDFRIGFGSFVEKTVMPYISTTPAKLRNPCTSEQNCTSPFSYKNVLSLTNKGEVFNELVGKQRISGNLDSPEGGFDAIMQVAVCGSLIGWRNVTRLLVFSTDAGFHFAGDGKLGGIVLPNDGQCHLENNMYTMSHYYDYPSIAHLVQKLSENNIQTIFAVTEEFQPVYKELKNLIPKSAVGTLSANSSNVIQLIIDAYNSLSSEVILENGKLSEGVTISYKSYCKNGVNGTGENGRKCSNISIGDEVQFEISITSNKCPKKDSDSFKIRPLGFTEEVEVILQYICECECQSEGIPESPKCHEGNGTFECGACRCNEGRVGRHCECSTDEVNSEDMDAYCRKENSSEICSNNGECVCGQCVCRKRDNTNEIYSGKFCECDNFNCDRSNGLICGGNGVCKCRVCECNPNYTGSACDCSLDTSTCEASNGQICNGRGICECGVCKCTDPKFQGQTCEMCQTCLGVCAEHKECVQCRAFNKVESRDKLPQPVQPDPVSHCKEKDVDDCWFYFTYSVNGNNEVMVHVVENPVSHWSRHHSNCSWCGCWNCSYWPCITADMEAFNDNS

SEQ ID NO: 523 - protein, 825 aa, Homo sapiens; identical to SEQ ID NO: 511

SEQ ID NO: 524 - protein, 825 aa, Homo sapiens; identical to SEQ ID NO: 511

SEQ ID NO: 525 - protein, 271 aa, Homo sapiens
MASADSRRVADGGGAGGTFQPYLDTLRQELQQTDPTLLSVVVAVLAVLLTLVFWKLIRSRRSSQRAVLLVGLCDSGKTLLFVRLLTGLYRDTQTSITDSCAVYRVNNNRGNSLTLIDLPGHESLRLQFLERFKSSARAIVFVVDSAAFQREVKDVAEFLYQVLIDSMGLKNTPSFLIACNKQDIAMAKSAKLIQQQLEKELNTLRVTRSAAPSTLDSSSTAPAQLGKKGKEFEFSQLPLKVEFLECSAKGGRGDVGSADIQDLEKWLAKIA

SEQ ID NO: 526 - protein, 200 aa, Homo sapiens
MASADSRRVADGGGAGGTFQPYLDTLRQELQQTDPTLLSVVVAVLAVLLTLVFWKLIRSRRSSQRAVLLVGLCDSGKTLLFVRLLTGLYRDTQTSITDSCAVYRVNNNRGNSLTLIDLPGHESLRLQFLERFKSSARAIVFVVDSAAFQREVKDVAEFLYQVLIDSMGLKNTPSFLIACNKQDIAMAKSAKLIQQQLEKE

SEQ ID NO: 527 - protein, 271 aa, Homo sapiens; identical to SEQ ID NO: 525

SEQ ID NO: 528 - protein, 271 aa, Homo sapiens
MASADSRRVADGGGAGGTFQPYLDTLRQELQQTDPTLLSVVVAVLAVLLTLVFWKLIRSRRSSQRAVLLVGLCDSGKTLLFVRLLTGLYRDTQTSITDSCAVYRVNNNRGNSLTLIDLPGHESLRLQFLERFKSSAGAIVFVVDSAAFQREVKDVAEFLYQVLIDSMGLKNTPSFLIACNKQDIAMAKSAKLIQQQLEKELNTLRVTRSAAPSTLYSSSTAPAQLGKKGKEFEFSQLPLKVEFLECSAKGGRGDVGSADIQDLEKWLAKIA

SEQ ID NO: 529 - protein, 271 aa, Homo sapiens; identical to SEQ ID NO: 525

SEQ ID NO: 530 - protein, 762 aa, Homo sapiens
MSWMLVCDRPEKEQLKMLLLAVLNFTALLIEYSFSRHLYSSIEHLTTLLASSDMQVVLAVLNLLYVFSKRSNYITRLGSDKRTPLLTRLQHLAESWGGKENGFGLAECCRDLQMLKYPPSATTLHFEFYADPGAEVKIEKRTTSNTLHYIHIEQLDKISESPSEIMESLTKMYSIPKDKQMLLFTHIRLAHGFSNHRKRLQAVQARLHAISILVYSNALQESANSILYNGLIEELVDVLQITDKQLMEIKAASLRTLTSIVHLERTPKLSSIIDCTGTASYHGFLPVLVRNCIQAMIDPSMDPYPHQFATALFSFLYHLASYDAGGEALVSCGMMEALLKVIKFLGDEQDQITFVTRAVRVVDLITNLDMAAFQSHSGLSIFIYRLEHEVDLCRKECPFVIKPKIQRPSTTQEGEEMETDMDGVQCIPQRAALLKSMLNFLKKAIQDPAFSDGIRHVMDGSLPTSLKHIISNAEYYGPSLFLLATEVVTVFVFQEPSLLSSLQDNGLTDVMLHALLIKDVPATREVLGSLPNVFSALCLNARGLQSFVQCQPFERLFKVLLSPDYLPAMRRRRSSDPLGDTASNLGSAVDELMRHQPTLKTDATTAIIKLLEEICNLGRDPKYICQKPSIQKADGTATAPPPRSNHAAEEASSEDEEEEEVQAMQSFNSAQQNETEPNQQVVGTEERIPIPLMDYILNVMKFVESILSNNTTDDHCQEFVNQKGLLPLVTILGLPNLPIDFPTSAACQAVAGVCKSILVRNI

SEQ ID NO: 531 - protein, 492 aa, Homo sapiens
MKLLLLHPAFQSCLLLTLLGLWRTTPEAHASSLGAPAISAASFLQDLIHRYGEGDSLTLQQLKALLNHLDVGVGRGNVTQHVQGHRNLSTCFSSGDLFTAHNFSEQSRIGSSELQEFCPTILQQLDSRACTSENQENEENEQTEEGRPSAVEVWGFGFLSVSLINLASLLGVLVLPCTEKAFFSRVLTYFIALSIGTLLSNALFQLIPEAFGFNPLEDYYVSKSAVVFGGFYLFFFTEKILKILLKQKNEHHHGHSHYASESLPSKKDQEEGVMEKLQNGDLDHMIPQHCSSELDGKAPMVDEKVIVGSLSVQDLQASQSACYWLKGVRYSDIGTLAWMITLSDGLHNFIDGLAIGASFTVSVFQGISTSVAILCEEFPHELGDFVILLNAGMSIQQALFFNFLSACCCYLGLAFGILAGSHFSANWIFALAGGMFLYISLADMFPEMNEVCQEDERKGSILIPFIIQNLGLLTGFTIMVVLTMYSGQIQIG

SEQ ID NO: 532 - protein, 492 aa, Homo sapiens
MKLLLLHPAFQSCLLLTLLGLWRTTPEAHASSLGAPAISAASFLQDLIHRYGEGDSLTLQQLKALLNHLDVGVGRGNVTQHVQGHRNLSTCFSSGDLFTAHNFSEQSRIGSSELQEFCPTILQQLDSRACTSENQENEENEQTEEGRPSAVEVWGYGLLCVTVISLCSLLGASVVPFMKKTFYKRLLLYFIALAIGTLYSNALFQLIPEAFGFNPLEDYYVSKSAVVFGGFYLFFFTEKILKILLKQKNEHHHGHSHYASESLPSKKDQEEGVMEKLQNGDLDHMIPQHCSSELDGKAPMVDEKVIVGSLSVQDLQASQSACYWLKGVRYSDIGTLAWMITLSDGLHNFIDGLAIGASFTVSVFQGISTSVAILCEEFPHELGDFVILLNAGMSIQQALFFNFLSACCCYLGLAFGILAGSHFSANWIFALAGGMFLYISLADMFPEMNEVCQEDERKGSILIPFIIQNLGLLTGFTIMVVLTMYSGQIQIG

SEQ ID NO: 533 - protein, 481 aa, Homo sapiens
MKLLLLHPAFQSCLLLTLLGLWRTTPEAHASSLGAPAISAASFLQDLIHRYGEGDSLTLQQLKALLNHLDVGVGRGNVTQHVQGHRNLSTCFSSGDLFTAHNFSEQSRIGSSELQEFCPTILQQLDSRACTSENQENEENEQTEEGRPSAVEVWGYGLLCVTVISLCSLLGASVVPFMKKTFYKRLLLYFIALAIGTLYSNALFQLIPEAFGFNPLEDYYVSKSAVVFGGFYLFFFTEKILKILLKQKNEHHHGHSHYASESLPSKKDQEEGVMEKLQNGDLDHMIPQHCSSELDGKAPMVDEKVIVGSLSVQDLQASQSACYWLKGVRYSDIGTLAWMITLSDGLHNFIDGLAIGASFTVSVFQGISTSVAILCEEFPHELGDFVILLNAGMSIQQALFFNFLSACCCYLGLAFGILAGSHFSANWIFALAGGMFLYISLADMMEFCSVAQAGVQWCHLSSLQPLPLGLKRLSCLSLPSN

SEQ ID NO: 534 - protein, 557 aa, Homo sapiens
MGAGADHSQGREAQEGAGWPVRGVGARVYADAPAKLLLPPPAAWDLAVRLRGAEAASERQVYSVTMKLLLLHPAFQSCLLLTLLGLWRTTPEAHASSLGAPAISAASFLQDLIHRYGEGDSLTLQQLKALLNHLDVGVGRGNVTQHVQGHRNLSTCFSSGDLFTAHNFSEQSRIGSSELQEFCPTILQQLDSRACTSENQENEENEQTEEGRPSAVEVWGYGLLCVTVISLCSLLGASVVPFMKKTFYKRLLLYFIALAIGTLYSNALFQLIPEAFGFNPLEDYYVSKSAVVFGGFYLFFFTEKILKILLKQKNEHHHGHSHYASESLPSKKDQEEGVMEKLQNGDLDHMIPQHCSSELDGKAPMVDEKVIVGSLSVQDLQASQSACYWLKGVRYSDIGTLAWMITLSDGLHNFIDGLAIGASFTVSVFQGISTSVAILCEEFPHELGDFVILLNAGMSIQQALFFNFLSACCCYLGLAFGILAGSHFSANWIFALAGGMFLYISLADMFPEMNEVCQEDERKGSILIPFIIQNLGLLTGFTIMVVLTMYSGQIQIG

SEQ ID NO: 535 - protein, 492 aa, Homo sapiens; identical to SEQ ID NO: 532

SEQ ID NO: 536 - protein, 963 aa, Homo sapiens
MATAAETSASEPEAESKAGPKADGEEDEVKAARTRRKVLSRAVAAATYKTMGPAWDQQEEGVSESDGDEYAMASSAESSPGEYEWEYDEEEEKNQLEIERLEEQLSINVYDYNCHVDLIRLLRLEGELTKVRMARQKMSEIFPLTEELWLEWLHDEISMAQDGLDREHVYDLFEKAVKDYICPNIWLEYGQYSVGGIGQKGGLEKVRSVFERALSSVGLHMTKGLALWEAYREFESAIVEAARLEKVHSLFRRQLAIPLYDMEATFAEYEEWSEDPIPESVIQNYNKALQQLEKYKPYEEALLQAEAPRLAEYQAYIDFEMKIGDPARIQLIFERALVENCLVPDLWIRYSQYLDRQLKVKDLVLSVHNRAIRNCPWTVALWSRYLLAMERHGVDHQVISVTFEKALNAGFIQATDYVEIWQAYLDYLRRRVDFKQDSSKELEELRAAFTRALEYLKQEVEERFNESGDPSCVIMQNWARIEARLCNNMQKARELWDSIMTRGNAKYANMWLEYYNLERAHGDTQHCRKALHRAVQCTSDYPEHVCEVLLTMERTEGSLEDWDIAVQKTETRLARVNEQRMKAAEKEAALVQQEEEKAEQRKRARAEKKALKKKKKIRGPEKRGADEDDEKEWGDDEEEQPSKRRRVENSIPAAGETQNVEVAAGPAGKCAAVDVEPPSKQKEKAASLKRDMPKVLHDSSKDSITVFVSNLPYSMQEPDTKLRPLFEACGEVVQIRPIFSNRGDFRGYCYVEFKEEKSALQALEMDRKSVEGRPMFVSPCVDKSKNPDFKVFRYSTSLEKHKLFISGLPFSCTKEELEEICKAHGTVKDLRLVTNRAGKPKGLAYVEYENESQASQAVMKMDGMTIKENIIKVAISNPPQRKVPEKPETRKAPGGPMLLPQTYGARGKGRTQLSLLPRALQRPSAAAPQAENGPAAAPAVAAPAATEAPKMSNADFAKLFLRK

SEQ ID NO: 537 - protein, 1173 aa, Homo sapiens
EWRPRRLADALSLGLGPGLVEPVDVVDNADGTQTVNYVPSREGPYSISVLYGDEEVPRSPFKVKVLPTHDASKVKASGPGLNTTGVPASLPVEFTIDAKDAGEGLLAVQITDPEGKPKKTHIQDNHDGTYTVAYVPDVTGRYTILIKYGGDEIPFSPYRVRAVPTGDASKCTVTVSIGGHGLGAGIGPTIQIGEETVITVDTKAAGKGKVTCTVCTPDGSEVDVDVVENEDGTFDIFYTAPQPGKYVICVRFGGEHVPNSPFQVTALAGDQPSVQPPLRSQQLAPQYTYAQGGQQTWAPERPLVGVNGLDVTSLRPFDLVIPFTIKKGEITGEVRMPSGKVAQPTITDNKDGTVTVRYAPSEAGLHEMDIRYDNMHIPGSPLQFYVDYVNCGHVTAYGPGLTHGVVNKPATFTVNTKDAGEGGLSLAIEGPSKAEISCTDNQDGTCSVSYLPVLPGDYSILVKYNEQHVPGSPFTARVTGDDSMRMSHLKVGSAADIPINISETDLSLLTATVVPPSGREEPCLLKRLRNGHVGISFVPKETGEHLVHVKKNGQHVASSPIPVVISQSEIGDASRVRVSGQGLHEGHTFEPAEFIIDTRDAGYGGLSLSIEGPSKVDINTEDLEDGTCRVTYCPTEPGNYIINIKFADQHVPGSPFSVKVTGEGRVKESITRRRRAPSVANVGSHCDLSLKIPEISIQDMTAQVTSPSGKTHEAEIVEGENHTYCIRFVPAEMGTHTVSVKYKGQHVPGSPFQFTVGPLGEGGAHKVRAGGPGLERAEAGVPAEFSIWTREAGAGGLAIAVEGPSKAEISFEDRKDGSCGVAYVVQEPGDYEVSVKFNEEHIPDSPFVVPVASPSGDARRLTVSSLQESGLKVNQPASFAVSLNGAKGAIDAKVHSPSGALEECYVTEIDQDKYAVRFIPRENGVYLIDVKFNGTHIPGSPFKIRVGEPGHGGDPGLVSAYGAGLEGGVTGNPAEFVVNTSNAGAGALSVTIDGPSKVKMDCQECPEGYRVTYTPMAPGSYLISIKYGGPYHIGGSPFKAKVTGPRLVSNHSLHETSSVFVDSLTKATCAPQHGAPGPGPADASKVVAKGLGLSKAYVGQKSSFTVDCSKAGNNMLLVGVHGPRTPCEEILVKHVGSRLYSVSYLLKDKGEYTLVVKWGDEHIPGSPYRVVVP

SEQ ID NO: 538 - protein, 72 aa, Homo sapiens
MAKISGPTETARCIESLIAVFQKYAGKDGYNCNLSKTEFPSFMNKELAAFTKNQKDPGVLDRMKKLAVSSDG

SEQ ID NO: 539 - protein, 105 aa, Homo sapiens
MAKISSPTETERCIESLIAVFQKYAGKDGYNYTLSKTEFLSFMNTELAAFTKNQKDPGVLDRMMKKLDTNSDGQLDFSEFLNLIGGLAMACHDSFLKAVPSQKRT

SEQ ID NO: 540 - protein, 105 aa, Homo sapiens; identical to SEQ ID NO: 539

SEQ ID NO: 541 - protein, 102 aa, Homo sapiens
MAKISSPTETERCIESLIAVFQKYAGKDGYNRNLSKTEFLSFMNTELAAFTKNQKDPGVLDHMKKLDVSSDGQLDFPKFLNLIGGLAVACHDSFLKAVPSQK

SEQ ID NO: 542 - protein, 102 aa, Homo sapiens [sequence omitted]

SEQ ID NO: 543 - protein, 1212 aa, Homo sapiens
MEPRPTAPSSGAPGLAGVGETPSAAALAAARVELPGTAVPSVPEDAAPASRDGGGVRDEGPAAAGDGLGRPLGPTPSQSRFQVDLVSENAGRAAAAAAAAAAAAAAAGAGAGAKQTPADGEASGESEPAKGSEEAKGRFRVNFVDPAASSSAEDSLSDAAGVGVDGPNVSFQNGGDTVLSEGSSLHSGGGGGSGHHQHYYYDTHTNTYYLRTFGHNTMDAVPRIDHYRHTAAQLGEKLLRPSLAELHDELEKEPFEDGFANGEESTPTRDAVVTYTAESKGVVKFGWIKGVLVRCMLNIWGVMLFIRLSWIVGQAGIGLSVLVIMMATVVTTITGLSTSAIATNGFVRGGGAYYLISRSLGPEFGGAIGLIFAFANAVAVAMYVVGFAETVVELLKEHSILMIDEINDIRIIGAITVVILLGISVAGMEWEAKAQIVLLVILLLAIGDFVIGTFIPLESKKPKGFFGYKSEIFNENFGPDFREEETFFSVFAIFFPAATGILAGANISGDLADPQSAIPKGTLLAILITTLVYVGIAVSVGSCVVRDATGNVNDTIVTELTNCTSAACKLNFDFSSCESSPCSYGLMNNFQVMSMVSGFTPLISAGIFSATLSSALASLVSAPKIFQALCKDNIYPAFQMFAKGYGKNNEPLRGYILTFLIALGFILIAELNVIAPIISNFFLASYALINFSVFHASLAKSPGWRPAFKYYNMWISLLGAILCCIVMFVINWWAALLTYVIVLGLYIYVTYKKPDVNWGSSTQALTYLNALQHSIRLSGVEDHVKNFRPQCLVMTGAPNSRPALLHLVHDFTKNVGLMICGHVHMGPRRQAMKEMSIDQAKYQRWLIKNKMKAFYAPVHADDLREGAQYLMQAAGLGRMKPNTLVLGFKKDWLQADMRDVDMYINLFHDAFDIQYGVVVIRLKEGLDISHLQGQEELLSSQEKSPGTKDVVVSVEYSKKSDLDTSKPLSEKPITHKVEEEDGKTATQPLLKKESKGPIVPLNVADQKLLEASTQFQKKQGKNTIDVWWLFDDGGLTLLIPYLLTTKKKWKDCKIRVFIGGKINRIDHDRRAMATLLSKFRIDFSDIMVLGDINTKPKKENIIAFEEIIEPYRLHEDDKEQDIADKMKEDEPWRITDNELELYKTKTYRQIRLNELLKEHSSTANIIVMSLPVARKGAVSSALYMAWLEALSKDLPPILLVRGNHQSVLTFYS

SEQ ID NO: 544 - protein, 1212 aa, Homo sapiens; identical to SEQ ID NO: 543

SEQ ID NO: 545 - protein, 1212 aa, Homo sapiens; identical to SEQ ID NO: 543

SEQ ID NO: 546 - protein, 259 aa, Homo sapiens
MAPNIYLVRQRISRLGQRMSGFQINLNPLKEPLGFIKVLEWIASIFAFATCGGFKGQTEIQVNCPPAVTENKTVTATFGYPFRLNEASFQPPPGVNICDVNWKDYVLIGDYSSSAQFYVTFAVFVFLYCIAALLLYVGYTSLYLDSRKLPMIDFVVTLVATFLWLVSTSAWAKALTDIKIATGHNIIDELPPCKKKAVLCYFGSVTSMGSLNVSVIFGFLNMILWGGNAWFVYKETSLHSPSNTSAPHSQGGIPPPTGI

SEQ ID NO: 547 - protein, 259 aa, Homo sapiens; identical to SEQ ID NO: 546

SEQ ID NO: 548 - protein, 241 aa, Homo sapiens
MSGFQINLNPLKEPLGFIKVLEWIASIFAFATCGGFKGQTEIQVNCPPAVTENKTVTATFGYPFRLNEASFQPPPGVNICDVNWKDYVLIGDYSSSAQFYVTFAVFVFLYCIAALLLYVGYTSLYLDSRKLPMIDFVVTLVATFLWLVSTSAWAKALTDIKIATGHNIIDELPPCKKKAVLCYFGSVTSMGSLNVSVIFGFLNMILWGGNAWFVYKETSLHSPSNTSAPHSQGGIPPPTGI

SEQ ID NO: 549 - protein, 259 aa, Homo sapiens; identical to SEQ ID NO: 546

SEQ ID NO: 550 - protein, 725 aa, Homo sapiens
MAAASAVSVLLVAAERNRWHRLPSLLLPPRTWVWRQRTMKYTTATGRNITKVLIANRGEIACRVMRTAKKLGVQTVAVYSEADRNSMHVDMADEAYSIGPAPSQQSYLSMEKIIQVAKTSAAQAIHPGCGFLSENMEFAELCKQEGIIFIGPPPSAIRDMGIKSTSKSIMAAAGVPVVEGYHGEDQSDQCLKEHARRIGYPVMIKAVRGGGGKGMRIVRSEQEFQEQLESARREAKKSFNDDAMLIEKFVDTPRHVEVQVFGDHHGNAVYLFERDCSVQRRHQKIIEEAPAPGIKSEVRKKLGEAAVRAAKAVNYVGAGTVEFIMDSKHNFCFMEMNTRLQVEHPVTEMITGTDLVEWQLRIAAGEKIPLSQEEITLQGHAFEARIYAEDPSNNFMPVAGPLVHLSTPRADPSTRIETGVRQGDEVSVHYDPMIAKLVVWAADRQAALTKLRYSLRQYNIVGLPTNIDFLLNLSGHPEFEAGNVHTDFIPQHHKQLLLSRKAAAKESLCQAALGLILKEKAMTDTFTLQAHDQFSPFSSSSGRRLNISYTRNMTLKDGKNNVAIAVTYNHDGSYSMQIEDKTFQVLGNLYSEGDCTYLKCSVNGVASKAKLIILENTIYLFSKEGSIEIDIPVPKYLSSVSSQETQGGPLAPMTGTIEKVFVKAGDKVKAGDSLMVMIAMKMEHTIKSPKDGTVKKVFYREGAQANRHTPLVEFEEEESDKRESE

SEQ ID NO: 551 - protein, 725 aa, Homo sapiens; identical to SEQ ID NO: 550

SEQ ID NO: 552 - protein, 545 aa, Homo sapiens
MNTVGPYHNRQETYKYFSLPFCVGSKKSISHYHETLGEALQGVELEFSGLDIKFKDDVMPATYCEIDLDKEKRDAFVYAIKNHYWYQMYIDDLPIWGIVGEADENGEDYYLWTYKKLEIGFNGNRIVDVNLTSEGKVKLVPNTKIQMSYSVKWKKSDVKFEDRFDKYLDPSFFQHRIHWFSIFNSFMMVIFLVGLVSMILMRTLRKDYARYSKEEEMDDMDRDLGDEYGWKQVHGDVFRPSSHPLIFSSLIGSGCQIFAVSLIVIIVAMIEDLYTERGSMLSTAIFVYAATSPVNGYFGGSLYARQGGRRWIKQMFIGAFLIPAMVCGTAFFINFIAIYYHASRAIPFGTMVAVCCICFFVILPLNLVGTILGRNLSGQPNFPCRVNAVPRPIPEKKWFMEPAVIVCLGGILPFGSIFIEMYFIFTSFWAYKIYYVYGFMMLVLVILCIVTVCVTIVCTYFLLNAEDYRWQWTSFLSAASTAIYVYMYSFYYYFFKTKMYGLFQTSFYFGYMAVFSTALGIMCGAIGYMGTSAFVRKIYTNVKID

SEQ ID NO: 553 - protein, 589 aa, Homo sapiens
MRPLPGALGVAAAAALWLLLLLLPRTRADEHEHTYQDKEEVVLWMNTVGPYHNRQETYKYFSLPFCVGSKKSISHYHETLGEALQGVELEFSGLDIKFKDDVMPATYCEIDLDKEKRDAFVYAIKNHYWYQMYIDDLPIWGIVGEADENGEDYYLWTYKKLEIGFNGNRIVDVNLTSEGKVKLVPNTKIQMSYSVKWKKSDVKFEDRFDKYLDPSFFQHRIHWFSIFNSFMMVIFLVGLVSMILMRTLRKDYARYSKEEEMDDMDRDLGDEYGWKQVHGDVFRPSSHPLIFSSLIGSGCQIFAVSLIVIIVAMIEDLYTERGSMLSTAIFVYAATSPVNGYFGGSLYARQGGRRWIKQMFIGAFLIPAMVCGTAFFINFIAIYYHASRAIPFGTMVAVCCICFFVILPLNLVGTILGRNLSGQPNFPCRVNAVPRPIPEKKWFMEPAVIVCLGGILPFGSIFIEMYFIFTSFWAYKIYYVYGFMMLVLVILCIVTVCVTIVCTYFLLNAEDYRWQWTSFLSAASTAIYVYMYSFYYYFFKTKMYGLFQTSFYFGYMAVFSTALGIMCGAIGYMGTSAFVRKIYTNVKID

SEQ ID NO: 554 - protein, 589 aa, Homo sapiens; identical to SEQ ID NO: 553

SEQ ID NO: 555 - protein, 589 aa, Homo sapiens; identical to SEQ ID NO: 553

SEQ ID NO: 556 - protein, 165 aa, Homo sapiens
MASGVQVADEVCRIFYDMKVRKCSTPEEIKKRKKAVIFCLSADKKCIIVEEGKEILVGDVGVTITDPFKHFVGMLPEKDCRYALYDASFETKESRKEELMFFLWAPELAPLKSKMIYASSKDAIKKKFQGIKHECQANGPEDLNRACIAEKLGGSLIVAFEGCPV

SEQ ID NO: 557 - protein, 165 aa, Homo sapiens; identical to SEQ ID NO: 556

SEQ ID NO: 558 - protein, 148 aa, Homo sapiens
MKVRKCSTPEEIKKRKKAVIFCLSADKKCIIVEEGKEILVGDVGVTITDPFKHFVGMLPEKDCRYALYDASFETKESRKEELMFFLWAPELAPLKSKMIYASSKDAIKKKFQGIKHECQANGPEDLNRACIAEKLGGSLIVAFEGCPV

SEQ ID NO: 559 - protein, 241 aa, Homo sapiens
MAEPSAATQSHSISSSSFGAEPSAPGGGGSPGACPALGTKSCSSSCAVHDLIFWRDVKKTGFVFGTTLIMLLSLAAFSVISVVSYLILALLSVTISFRIYKSVIQAVQKSEEGHPFKAYLDVDITLSSEAFHNYMNAAMVHINRALKLIIRLFLVEDLVDSLKLAVFMWLMTYVGAVFNGITLLILAELLIFSVPIVYEKYKDPSKTPWNRQKKGRISTWKPEMQQLLKHHLIVITSLLVL

SEQ ID NO: 560 - protein, 236 aa, Homo sapiens
MAEPSAATQSHSISSSSFGAEPSAPGGGGSPGACPALGTKSCSSSCAVHDLIFWRDVKKTGFVFGTTLIMLLSLAAFSVISVVSYLILALLSVTISFRIYKSVIQAVQKSEEGHPFKAYLDVDITLSSEAFHNYMNAAMVHINRALKLIIRLFLVEDLVDSLKLAVFMWLMTYVGAVFNGITLLILAELLIFSVPIVYEKYKTQIDHYVGIARDQTKSIVEKIQAKLPGIAKKKAE

SEQ ID NO: 561 - protein, 247 aa, Homo sapiens
MAEPSAATQSPSISSSSSGAETSASGGSGSPGACPALGTKSCSSSCAVHDLLFWRDVKKTGFVFATTLIMLLSLAAFSVISVVSYLILALLSVTISFRIYKSVIQAVQKSEEGHPIKAYLDVDITLSSEAFHNYMNAAVVHINRALKLIILLFLVEDLVDSLKQAVFMWLMTYVGAFFNGITLLILAELLIFSVPIVYEKYKTQIDHYVGIARHQTKSIVEKIQAKLPGIAKKKGRISTWNQKSNSY

SEQ ID NO: 562 - protein, 236 aa, Homo sapiens; identical to SEQ ID NO: 560

SEQ ID NO: 563 - protein, 236 aa, Homo sapiens; identical to SEQ ID NO: 560

SEQ ID NO: 564 - protein, 236 aa, Homo sapiens
MAEPSAATQSPSISSSSSGAETSASGGSGSPGACPALGTKSCSSSCAVHDLLFWRDVKKTGFVFATTLIMLLSLAAFSVISVVSYLILALLSVTISFRIYKSVIQAVQKSEEGHPIKAYLDVDITLSSEAFHNYMNAAVVHINRALKLIILLFLVEDLVDSLKQAVFMWLMTYVGAFFNGITLLILAELLIFSVPIVYEKYKTQIDHYVGIARHQTKSIVEKIQAKLPGIAKKKAE

SEQ ID NO: 565 - protein, 406 aa, Homo sapiens
MHPAVFLSLPDLRCSLLLLVTWVFTPVTTEITSLDTENIDEILNNADVALVNFYADWCRFSQMLHPIFEEASDVIKEEFPNENQVVFARVDCDQHSDIAQRYRISKYPTLKLFRNGMMMKREYRGQRSVKALADYIRQQKSDPIQEIRDLAEITTLDRSKRNIIGYFEQKDSDNYRVFERVANILHDDCAFLSAFGDVSKPERYSGDNIIYKPPGHSAPDMVYLGAMTNFDVTYNWIQDKCVPLVREITFENGEELTEEGLPFLILFHMKEDTESLEIFQNEVARQLISEKGTINFLHADCDKFRHPLLHIQKTPADCPVIAIDSFRHMYVFGDFKDVLIPGKLKQFVFDLHSGKLHREFHHGPDPTDTAPGEQAQDVASSPPESSFQKLAPSEYRYTLLRDRDEL

SEQ ID NO: 566 - protein, 523 aa, Homo sapiens
MQELEQKEEAAGEEANDGGSGHSLGQEGRESAAGAKADYISRSAPRWAGPGSEGVRGLSGSCPGCSPLEPGSRGRGAAAWRILRCRRLPEPSPFLTQPNLAQSQPPAPVPVTDPSVTMHPAVFLSLPDLRCSLLLLVTWVFTPVTTEITSLDTENIDEILNNADVALVNFYADWCRFSQMLHPIFEEASDVIKEEFPNENQVVFARVDCDQHSDIAQRYRISKYPTLKLFRNGMMMKREYRGQRSVKALADYIRQQKSDPIQEIRDLAEITTLDRSKRNIIGYFEQKDSDNYRVFERVANILHDDCAFLSAFGDVSKPERYSGDNIIYKPPGHSAPDMVYLGAMTNFDVTYNWIQDKCVPLVREITFENGEELTEEGLPFLILFHMKEDTESLEIFQNEVARQLISEKGTINFLHADCDKFRHPLLHIQKTPADCPVIAIDSFRHMYVFGDFKDVLIPGKLKQFVFDLHSGKLHREFHHGPDPTDTAPGEQAQDVASSPPESSFQKLAPSEYRYTLLRDRDEL

SEQ ID NO: 567 - protein, 387 aa, Homo sapiens [sequence omitted]

SEQ ID NO: 568 - protein, 418 aa, Homo sapiens
MSVKMGKKYKNIVLLKGLEVINDYHFRMVKSLLSNDLKLNLKMREEYDKIQIADLMEEKFRGDAGLGKLIKIFEDIPTLEDLAETLKKEKLKVKGPALSRKRKKEVDATSPAPSTSSTVKTEGAEATPGAQKRKKSTKEKAGPKGSKVSEEQTQPPSPAGAGMSTAMGRSPSPKTSLSAPPNSSSTENPKTVAKCQVTPRRNVLQKRPVIVKVLSTTKPFEYETPEMEKKIMFHATVATQTQFFHVKVLNTSLKEKFTPKKIIAIANYVCRNGFLEVYPFTLVADVNADRNMEIPKGLIRSASVTPKINQLCSQTKGSFVNGVFEVHKKNVRGEFTYYEIQDNTGKMEVVVHGRLTTINCEEGDKLKLTCFELAPKSGNTGELRSVIHSHIKVIKTRKNKKDILNPDSSMETSPDFFF

SEQ ID NO: 569 - protein, 72 aa, Homo sapiens [sequence omitted]

SEQ ID NO: 570 - protein, 789 aa, Homo sapiens [sequence omitted]

SEQ ID NO: 571 - protein, 733 aa, Homo sapiens [sequence omitted]

SEQ ID NO: 572 - protein, 733 aa, Homo sapiens [sequence omitted]

SEQ ID NO: 573 - protein, 586 aa, Homo sapiens
MRPLPGALGVAAAALWLLLLLLPRTRADEHEHTYQDKEEVVLWMNTVGPYHNRQETYKYFSLPFCVGSKKSISHYHETLGEALQGVELEFSGLDIKFKDDVMPATYCEIDLDKEKRDAFVYAIKNHYWYQMYIDDLPIWGIVGEADENGEDYYLWTYKKLEIGFNGNRIVDVNLTSEGKVKLGSKYYNPDVIFSKMEKSDVKFEDRFDNILIVLFSHRIHWFSIFNSFMMVIFLVGLVSMILMRTLRKDYARYSKEEEMDDMDRDLGDEYGWKQVHGDVFRPSSHPLIFSSLIGSGCQIFAVSLIVIIVAMIEDLYTERGSMLSTAIFVYAATSPVNGYFGGSLYARQGGRRWIKQMFIGAFLIPAMGVHCLLHQFHSHLLPCFKSHSFWNNGGRLLHLFFCYSSSKSCWYNTWPKSVRSAQLSLSCQCCASSYTGEKMVHGAAVIVCLGGILPFGSIFIEMYFIFTSFWAYKIYYVYGFMMLVLVILCIVTVCVTIVCTYFLLNAEDYRWQWTSFLSAASTAIYVYMYSFYYYFFKTKMYGLFQTSFYFGYMAVFSTALGIMCGAIGYMGTSAFVRKIYTNVKID

SEQ ID NO: 574 - protein, 331 aa, Homo sapiens
MWSRSQVYEVSVKFNEEHIPDSPFVVPVASPSGDARRLTVSSLQESGLKVNQPASFAVSLNGAKGAIDAKVHSPSGALEECYVTEIDQDKYAVRFIPRENGVYLIDVKFNGTHIPGSPFKIRVGEPGHGGDPGLVSAYGAGLEGGVTGNPAEFVVNTSNAGAGALSVTIDGPSKVKMDCQECPEGYRVTYTPMAPGSYLISIKYGGPYHIGGSPFKAKVTGPRLVSNHSLHETSSVFVDSLTKATCAPQHGAPGPGPADASKVVAKGLGLSKAYVGQKSSFTVDCSKAGNNMLLVGVHGPRTPCEEILVKHVGSRLYSVSYLRSPASPASR

SEQ ID NO: 575 - protein, 311 aa, Homo sapiens
MHPDGGQLECLNLRPSGGLLRGAGAQRGWAHTDGPAKWGGPGLRLFLTDTICWFEEGPQAHSMTPCSSDKYAVRFIPRENGVYLIDVKFNGTHIPGSPFKIRVGEPGHGGDPGLVSAYGAGLEGGVTGNPAEFVVNTSNAGAGALSVTIDGPSKVKMDCQECPEGYRVTYTPMAPGSYLISIKYGGPYHIGGSPFKAKVTGPRLVSNHSLHETSSVFVDSLTKATCAPQHGAPGPGPADASKVVAKGLGLSKAYVGQKSSFTVDCSKAGNNMLLVGVHGPRTPCEEILVKHVGSRLYSVSYLRSPASPASR

SEQ ID NO: 576 - protein, 271 aa, Homo sapiens
MEALPLLAATTPDHGRHRRLLLLPLLLFLLPAGAVQGWETEERPRTREEECHFYAGGQVYPGEASRVSVADHSLHLSKAKISKPAPYWEGTAVIDGEFKELKLTDYRGKYLVFFFYPLDFTFVCPTEIIAFGDRLEEFRSINTEVVACSVDSQFTHLAWINTPRRQGGLGPIRIPLLSDLTHQISKDYGVYLEDSGHTLRGLFIIDDKGILRQITLNDLPVGRSVDETLRLVQAFQYTDKHGEVCPAGWKPGSETIIPDPAGKLKYFDKLN

SEQ ID NO: 577 - protein, 271 aa, Homo sapiens; identical to SEQ ID NO: 576

SEQ ID NO: 578 - protein, 2110 aa, Homo sapiens [sequence omitted]

SEQ ID NO: 579 - protein, 2128 aa, Homo sapiens [sequence omitted]

SEQ ID NO: 580 - protein, 1536 aa, Homo sapiens [sequence omitted]

SEQ ID NO: 581 - protein, 1536 aa, Homo sapiens [sequence omitted]

SEQ ID NO: 582 - protein, 417 aa, Homo sapiens
MTLHATRGAALLSWVNSLHVADPVEAVLQLQDCSIFIKIIDRIHGTEEGQQILKQPVSERLDFVCSFLQKNRKHPSSPECLVSAQKVLEGSELELAKMTMLLLYHSTMSSKSPRDWEQFEYKIQAELAVILKFVLDHEDGLNLNEDLENFLQKAPVPSTCSSTFPEELSPPSHQAKREIRFLELQKVASSSSGNNFLSGSPASPMGDILQTPQFQMRRLKKQLADERSNRDELELELAENRKLLTEKDAQIAMMQQRIDRLALLNEKQAASPLEPKELEELRDKNESLTMRLHETLKQCQDLKTEKSQMDRKINQLSEENGDLSFKLREFASHLQQLQDALNELTEEHSKATQEWLEKQAQLEKELSAALQDKVTLCWGHSHSLDHMCKAESSLPLCSSGPLGIKLLSLQGSIVCCN

SEQ ID NO: 583 - protein, 988 aa, Homo sapiens
MTLHATRGAALLSWVNSLHVADPVEAVLQLQDCSIFIKIIDRIHGTEEGQQILKQPVSERLDFVCSFLQKNRKHPSSPECLVSAQKVLEGSELELAKMTMLLLYHSTMSSKSPRDWEQFEYKIQAELAVILKFVLDHEDGLNLNEDLENFLQKAPVPSTCSSTFPEELSPPSHQAKREIRFLELQKVASSSSGNNFLSGSPASPMGDILQTPQFQMRRLKKQLADERSNRDELELELAENRKLLTEKDAQIAMMQQRIDRLALLNEKQAASPLEPKELEELRDKNESLTMRLHETLKQCQDLKTEKSQMDRKINQLSEENGDLSFKLREFASHLQQLQDALNELTEEHSKATQEWLEKQAQLEKELSAALQDKKCLEEKNEILQGKLSQLEEHLSQLQDNPPQEKGEVLGDVLQVEELSKKLADSDQASKVQQQKLKAVQAQGGESQQEAQRLQAQLNELQAQLSQKEQAAEHYKLQMEKAKTHYDAKKQQNQELQEQLRSLEQLQKENKELRAEAERLGHELQQAGLKTKEAEQTCRHLTAQVRSLEAQVAHADQQLRDLGKFQVATDALKSREPQAKPQLDLSIDSLDLSCEEGTPLSITSKLPRTQPDGTSVPGEPASPISQRLPPKVESLESLYFTPIPARSQAPLESSLDSLGDVFLDSGRKTRSARRRTTQIINITMTKKLDVEEPDSANSSFYSTRSAPASQASLRATSSTQSLARLGSPDYGNSALLSLPGYRPTTRSSARRSQAGVSSGAPPGRNSFYMGTCQDEPEQLDDWNRIAELQQRNRVCPPHLKTCYPLESRPSLSLGTITDEEMKTGDPQETLRRASMQPIQIAEGTGITTRQQRKRVSLEPHQGPGTPESKKATSCFPRPMTPRDRHEGRKQSTTEAQKKAAPASTKQADRRQSMAFSILNTPKKLGNSLLRRGASKKALSKASPNTRSGTRRSPRIATTTASAATAAAIGATPRAKGKVEALAGWGRETR

SEQ ID NO: 584 - protein, 2101 aa, Homo sapiens
MTLHATRGAALLSWVNSLHVADPVEAVLQLQDCSIFIKIIDRIHGTEEGQQILKQPVSERLDFVCSFLQKNRKHPSSPECLVSAQKVLEGSELELAKMTMLLLYHSTMSSKSPRDWEQFEYKIQAELAVILKFVLDHEDGLNLNEDLENFLQKAPVPSTCSSTFPEELSPPSHQAKREIRFLELQKVASSSSGNNFLSGSPASPMGDILQTPQFQMRRLKKQLADERSNRDELELELAENRKLLTEKDAQIAMMQQRIDRLALLNEKQAASPLEPKELEELRDKNESLTMRLHETLKQCQDLKTEKSQMDRKINQLSEENGDLSFKLREFASHLQQLQDALNELTEEHSKATQEWLEKQAQLEKELSAALQDKKCLEEKNEILQGKLSQLEEHLSQLQDNPPQEKGEVLGDVLQLETLKQEAATLAANNTQLQARVEMLETERGQQEAKLLAERGHFEEEKQQLSSLITDLQSSISNLSQAKEELEQASQAHGARLTAQVASLTSELTTLNATIQQQDQELAGLKQQAKEKQAQLAQTLQQQEQASQGLRHQVEQLSSSLKQKEQQLKEVAEKQEATRQDHAQQLATAAEEREASLRERDAALKQLEALEKEKAAKLEILQQQLQVANEARDSAQTSVTQAQREKAELSRKVEELQACVETARQEQHEAQAQVAELELQLRSEQQKATEKERVAQEKDQLQEQLQALKESLKVTKGSLEEEKRRAADALEEQQRCISELKAETRSLVEQHKRERKELEEERAGRKGLEARLQQLGEAHQAETEVLRRELAEAMAAQHTAESECEQLVKEVAAWRERYEDSQQEEAQYGAMFQEQLMTLKEECEKARQELQEAKEKVAGIESHSELQISRQQNELAELHANLARALQQVQEKEVRAQKLADDLSTLQEKMAATSKEVARLETLVRKAGEQQETASRELVKEPARAGDRQPEWLEEQQGRQFCSTQAALQAMEREAEQMGNELERLRAALMESQGQQQEERGQQEREVARLTQERGRAQADLALEKAARAELEMRLQNALNEQRVEFATLQEALAHALTEKEGKDQELAKLRGLEAAQIKELEELRQTVKQLKEQLAKKEKEHASGSGAQSEAAGRTEPTGPKLEALRAEVSKLEQQCQKQQEQADSLERSLEAERASRAERDSALETLQGQLEEKAQELGHSQSALASAQRELAAFRTKVQDHSKAEDEWKAQVARGRQEAERKNSLISSLEEEVSILNRQVLEKEGESKELKRLVMAESEKSQKLEERLRLLQAETASNSARAAERSSALREEVQSLREEAEKQRVASENLRQELTSQAERAEELGQELKAWQEKFFQKEQALSTLQLEHTSTQALVSELLPAKHLCQQLQAEQAAAEKRHREELEQSKQAAGGLRAELLRAQRELGELIPLRQKVAEQERTAQQLRAEKASYAEQLSMLKKAHGLLAEENRGLGERANLGRQFLEVELDQAREKYVQELAAVRADAETRLAEVQREAQSTARELEVMTAKYEGAKVKVLEERQRFQEERQKLTAQVEELSKKLADSDQASKVQQQKLKAVQAQGGESQQEAQRLQAQLNELQAQLSQKEQAAEHYKLQMEKAKTHYDAKKQQNQELQEQLRSLEQLQKENKELRAEAERLGHELQQAGLKTKEAEQTCRHLTAQVRSLEAQVAHADQQLRDLGKFQVATDALKSREPQAKPQLDLSIDSLDLSCEEGTPLSITSKLPRTQPDGTSVPGEPASPISQRLPPKVESLESLYFTPIPARSQAPLESSLDSLGDVFLDSGRKTRSARRRTTQIINITMTKKLDVEEPDSANSSFYSTRSAPASQASLRATSSTQSLARLGSPDYGNSALLSLPGYRPTTRSSARRSQAGVSSGAPPGRNSFYMGTCQDEPEQLDDWNRIAELQQRNRVCPPHLKTCYPLESRPSLSLGTITDEEMKTGDPQETLRRASMQPIQIAEGTGITTRQQRKRVSLEPHQGPGTPESKKATSCFPRPMTPRDRHEGRKQSTTEAQKKAAPASTKQADRRQSMAFSILNTPKKLGNSLLRRGASKKALSKASPNTRSGTRRSPRIATTTASAATAAAIGATPRAKGKAKH

SEQ ID NO: 585 - protein, 2101 aa, Homo sapiens; identical to SEQ ID NO: 584

SEQ ID NO: 586 - protein, 2124 aa, Homo sapiens [sequence omitted]

SEQ ID NO: 587 - protein, 277 aa, Homo sapiens
MSSGIHVALVTGGNKGIGLAIVRDLCRLFSGDVVLTARDVTRGQAAVQQLQAEGLSPRFHQLDIDDLQSIRALRDFLRKEYGGLDVLVNNAGIAFKVADPTPFHIQAEVTMKTNFFGTRDVCTELLPLIKPQGRVVNVSSIMSVRALKSCSPELQQKFRSETITEEELVGLMNKFVEDTKKGVHQKEGWPSSAYGVTKIGVTVLSRIHARKLSEQRKGDKILLNACCPGWVRTDMAGPKATKSPEEGAETPVYLALLPPDAEGPHGQFVSEKRVEQW

SEQ ID NO: 588 - protein, 276 aa, Homo sapiens
SSGIHVALVTGGNKGIGLAIVRDLCRLFSGDVVLTARDVTRGQAAVQQLQAEGLSPRFHQLDIDDLQSIRALRDFLRKEYGGLDVLVNNAGIAFKVADPTPFHIQAEVTMKTNFFGTRDVCTELLPLIKPQGRVVNVSSIMSVRALKSCSPELQQKFRSETITEEELVGLMNKFVEDTKKGVHQKEGWPSSAYGVTKIGVTVLSRIHARKLSEQRKGDKILLNACCPGWVRTDMAGPKATKSPEEGAETPVYLALLPPDAEGPHGQFVSEKRVEQW

SEQ ID NO: 589 - protein, 352 aa, Homo sapiens
MASIWVGHRGTVRDYPDFSPSVDAEAIQKAIRGIGTDEKMLISILTERSNAQRQLIVKEYQAAYGKELKDDLKGDLSGHFEHLMVALVTPPAVFDAKQLKKSMKGAGTNEDALIEILTTRTSRQMKDISQAYYTVYKKSLGDDISSETSGDFRKALLTLADVRRDESLKVDEHLAKQDAQILYKAGENRWGTDEDKFTEILCLRSFPQLKLTFDEYRNISQKDIVDSIKGELSGHFEDLLLAIVNCVRNTPAFLAERLHRALKGIGTDEFTLNRIMVSRSEIDLLDIRTEFKKHYGYSLYSAIKSDTSGDYEITLLKMGFPNSSTLLLLILFKRTSKYKQQLVFLTGIFIVL

SEQ ID NO: 590 - protein, 323 aa, Homo sapiens
MASIWVGHRGTVRDYPDFSPSVDAEAIQKAIRGIGTDEKMLISILTERSNAQRQLIVKEYQAAYGKELKDDLKGDLSGHFEHLMVALVTPPAVFDAKQLKKSMKGAGTNEDALIEILTTRTSRQMKDISQAYYTVYKKSLGDDISSETSGDFRKALLTLADGRRDESLKVDEHLAKQDAQILYKAGENRWGTDEDKFTEILCLRSFPQLKLTFDEYRNISQKDIVDSIKGELSGHFEDLLLAIVNCVRNTPAFLAERLHRALKGIGTDEFTLNRIMVSRSEIDLLDIRTEFKKHYGYSLYSAIKSDTSGDYEITLLKICGGDD

SEQ ID NO: 591 - protein, 323 aa, Homo sapiens; identical to SEQ ID NO: 590

SEQ ID NO: 592 - protein, 284 aa, Homo sapiens
MLISILTERSNAQRQLIVKEYQAAYGKELKDDLKGDLSGHFEHLMVALVTPPAVFDAKQLKKSMKGAGTNEDALIEILTTRTSRQMKDISQAYYTVYKKSLGDDISSETSGDFRKALLTLADVRRDESLKVDEHLAKQDAQILYKAGENRWGTDEDKFTEILCLRSFPQLKLTFDEYRNISQKDIVDSIKGELSGHFEDLLLAIVNCVRNTPAFLAERLHRALKGIGTDEFTLNRIMVSRSEIDLLDIRTEFKKHYGYSLYSAIKSDTSGDYEITLLKICGGDD

SEQ ID NO: 593 - protein, 323 aa, Homo sapiens; identical to SEQ ID NO: 590

SEQ ID NO: 594 - protein, 687 aa, Homo sapiens
MAEELVLERCDLELETNGRDHHTADLCREKLVVRRGQPFWLTLHFEGRNYEASVDSLTFSVVTGPAPSQEAGTKARFPLRDAVEEGDWTATVVDQQDCTLSLQLTTPANAPIGLYRLSLEASTGYQGSSFVLGHFILLFNAWCPADAVYLDSEEERQEYVLTQQGFIYQGSAKFIKNIPWNFGQFEDGILDICLILLDVNPKFLKNAGRDCSRRSSPVYVGRVVSGMVNCNDDQGVLLGRWDNNYGDGVSPMSWIGSVDILRRWKNHGCQRVKYGQCWVFAAVACTVLRCLGIPTRVVTNYNSAHDQNSNLLIEYFRNEFGEIQGDKSEMIWNFHCWVESWMTRPDLQPGYEGWQALDPTPQEKSEGTYCCGPVPVRAIKEGDLSTKYDAPFVFAEVNADVVDWIQQDDGSVHKSINRSLIVGLKISTKSVGRDEREDITHTYKYPEGSSEEREAFTRANHLNKLAEKEETGMAMRIRVGQSMNMGSDFDVFAHITNNTAEEYVCRLLLCARTVSYNGILGPECGTKYLLNLNLEPFSEKSVPLCILYEKYRDCLTESNLIKVRALLVEPVINSYLLAERDLYLENPEIKIRILGEPKQKRKLVAEVSLQNPLPVALEGCTFTVEGAGLTEEQKTVEIPDPVEAGEEVKVRMDLLPLHMGLHKLVVNFESDKLKAVKGFRNVIIGPA

SEQ ID NO: 595 - protein, 687 aa, Homo sapiens
MAEELVLERCDLELETNGRDHHTADLCREKLVVRRGQPFWLTLHFEGRNYQASVDSLTFSVVTGPAPSQEAGTKARFPLRDAVEEGDWTATVVDQQDCTLSLQLTTPANAPIGLYRLSLEASTGYQGSSFVLGHFILLFNAWCPADAVYLDSEEERQEYVLTQQGFIYQGSAKFIKNIPWNFGQFQDGILDICLILLDVNPKFLKNAGRDCSRRSSPVYVGRVGSGMVNCNDDQGVLLGRWDNNYGDGVSPMSWIGSVDILRRWKNHGCQRVKYGQCWVFAAVACTVLRCLGIPTRVVTNYNSAHDQNSNLLIEYFRNEFGEIQGDKSEMIWNFHCWVESWMTRPDLQPGYEGWQALDPTPQEKSEGTYCCGPVPVRAIKEGDLSTKYDAPFVFAEVNADVVDWIQQDDGSVHKSINRSLIVGLKISTKSVGRDEREDITHTYKYPEGSSEEREAFTRANHLNKLAEKEETGMAMRIRVGQSMNMGSDFDVFAHITNNTAEEYVCRLLLCARTVSYNGILGPECGTKYLLNLTLEPFSEKSVPLCILYEKYRDCLTESNLIKVRALLVEPVINSYLLAERDLYLENPEIKIRILGEPKQKRKLVAEVSLQNPLPVALEGCTFTVEGAGLTEEQKTVEIPDPVEAGEEVKVRMDLVPLHMGLHKLVVNFESDKLKAVKGFRNVIIGPA

SEQ ID NO: 596 - protein, 687 aa, Homo sapiens; identical to SEQ ID NO: 594

SEQ ID NO: 597 - protein, 687 aa, Homo sapiens; identical to SEQ ID NO: 594

SEQ ID NO: 598 - protein, 548 aa, Homo sapiens
MAEELVLERCDLELETNGRDHHTADLCREKLVVRRGQPFWLTLHFEGRNYEASVDSLTFSVVTGPAPSQEAGTKARFPLRDAVEEGDWTATVVDQQDCTLSLQLTTPANAPIGLYRLSLEASTGYQGSSFVLGHFILLFNAWCPADAVYLDSEEERQEYVLTQQGFIYQGSAKFIKNIPWNFGQFEDGILDICLILLDVNPKFLKNAGRDCSRRSSPVYVGRVVSGMVNCNDDQGVLLGRWDNNYGDGVSPMSWIGSVDILRRWKNHGCQRVKYGQCWVFAAVACTVLRCLGIPTRVVTNYNSAHDQNSNLLIEYFRNEFGEIQGDKSEMIWNFHCWVESWMTRPDLQPGYEGWQALDPTPQEKSEGTYCCGPVPVRAIKEGDLSTKYDAPFVFAEVNADVVDWIQQDDGSVHKSINRSLIVGLKISTKSVGRDEREDITHTYKYPEGSSEEREAFTRANHLNKLAEKEETGMAMRIRVGQSMNMGSDFDVFAHITNNTAEEYVCRLLLCARTVSYNGILGPECGTKYLLNLNLEPFSGKALCSWSIC

SEQ ID NO: 599 - protein, 687 aa, Homo sapiens; identical to SEQ ID NO: 594

SEQ ID NO: 600 - protein, 687 aa, Homo sapiens; identical to SEQ ID NO: 594

SEQ ID NO: 601 - protein, 858 aa, Homo sapiens
MRPMRIFVNDDRHVMAKHSSVYPTQEELEAVQNMVSHTERALKAVSDWIDEQEKGSSEQAESDNMDVPPEDDSKEGAGEQKTEHMTRTLRGVMRVGLVAKGLLLKGDLDLELVLLCKEKPTTALLDKVADNLAIQLAAVTEDKYEILQSVDDAAIVIKNTKEPPLSLTIHLTSPVVREEMEKVLAGETLSVNDPPDVLDRQKCLAALASLRHAKWFQARANGLKSCVIVIRVLRDLCTRVPTWGPLRGWPLELLCEKSIGTANRPMGAGEALRRVLECLASGIVMPDGSGIYDPCEKEATDAIGHLDRQQREDITQSAQHALRLAAFGQLHKVLGMDPLPSKMPKKPKNENPVDYTVQIPPSTTYAITPMKRPMEEDGEEKSPSKKKKKIQKKEEKAEPPQAMNALMRLNQLKPGLQYKLVSQTGPVHAPIFTMSVEVDGNSFEASGPSKKTAKLHVAVKVLQDMGLPTGAEGRDSSKGEDSAEETEAKPAVVAPAPVVEAVSTPSAAFPSDATAENVKQQGPILTKHGKNPVMELNEKRRGLKYELISETGGSHDKRFVMEVEVDGQKFQGAGSNKKVAKAYAALAALEKLFPDTPLALDANKKKRAPVPVRGGPKFAAKPHNPGFGMGGPMHNEVPPPPNLRGRGRGGSIRGRGRGRGFGGANHGGYMNAGAGYGSYGYGGNSATAGQFYSNGGHSGNASGGGGGGGGGSSGYGSYYQGDNYNSPVPPKHAGKKQPHGGQQKPSYGSGYQSHQGQQQSYNQSPYSNYGPPQGKQKGYNHGQGSYSYSNSYNSPGGGGGSDYNYESKFSELASRAPRPGQGPGPSSAAHGVAEARHCPDLWLRALGGGQVVLAAGGC

SEQ ID NO: 602 - protein, 894 aa, Homo sapiens
MRPMRIFVNDDRHVMAKHSSVYPTQEELEAVQNMVSHTERALKAVSDWIDEQEKGSSEQAESDNMDVPPEDDSKEGAGEQKTEHMTRTLRGVMRVGLVAKGLLLKGDLDLELVLLCKEKPTTALLDKVADNLAIQLAAVTEDKYEILQSVDDAAIVIKNTKEPPLSLTIHLTSPVVREEMEKVLAGETLSVNDPPDVLDRQKCLAALASLRHAKWFQARANGLKSCVIVIRVLRDLCTRVPTWGPLRGWPLELLCEKSIGTANRPMGAGEALRRVLECLASGIVMPDGSGIYDPCEKEATDAIGHLDRQQREDITQSAQHALRLAAFGQLHKVLGMDPLPSKMPKKPKNENPVDYTVQIPPSTTYAITPMKRPMEEDGEEKSPSKKKKKIQKKEEKAEPPQAMNALMRLNQLKPGLQYKLVSQTGPVHAPIFTMSVEVDGNSFEASGPSKKTAKLHVAVKVLQDMGLPTGAEGRDSSKGEDSAEETEAKPAVVAPAPVVEAVSTPSAAFPSDATAEQGPILTKHGKNPVMELNEKRRGLKYELISETGGSHDKRFVMEVEVDGQKFQGAGSNKKVAKAYAALAALEKLFPDTPLALDANKKKRAPVPVRGGPKFAAKPHNPGFGMGGPMHNEVPPPPNLRGRGRGGSIRGRGRGRGFGGANHGGYMNAGAGYGSYGYGGNSATAGYSQFYSNGGHSGNASGGGGGGGGGSSGYGSYYQGDNYNSPVPPKHAGKKQPHGGQQKPSYGSGYQSHQGQQQSYNQSPYSNYGPPQGKQKGYNHGQGSYSYSNSYNSPGGGGGSDYNYESKFNYSGSGGRSGGNSYGSGGASYNPGSHGGYGGGSGGGSSYQGKQGGYSQSNYNSPGSGQNYSGPPSSYQSSQGGYGRNADHSMNYQYR

SEQ ID NO: 603 - protein, 894 aa, Homo sapiens [sequence omitted]

SEQ ID NO: 604 - protein, 690 aa, Homo sapiens
MRPMRIFVNDDRHVMAKHSSVYPTQEELEAVQNMVSHTERALKAVSDWIDEQEKGSSEQAESDNMDVPPEDDSKEGAGEQKTEHMTRTLRGVMRVGLVAKGLLLKGDLDLELVLLCKEKPTTALLDKVADNLAIQLAAVTEDKYEILQSVDDAAIVIKNTKEPPLSLTIHLTSPVVREEMEKVLAGETLSVNDPPDVLDRQKCLAALASLRHAKWFQARANGLKSCVIVIRVLRDLCTRVPTWGPLRGWPLELLCEKSIGTANRPMGAGEALRRVLECLASGIVMPDGSGIYDPCEKEATDAIGHLDRQQREDITQSAQHALRLAAFGQLHKVLGMDPLPSKMPKKPKNENPVDYTVQIPPSTTYAITPMKRPMEEDGEEKSPSKKKKKIQKKEEKAEPPQAMNALMRLNQLKPGLQYKLVSQTGPVHAPIFTMSVEVDGNSFEASGPSKKTAKLHVAVKVLQDMGLPTGAEGRDSSKGEDSAEETEAKPAVVAPAPVVEAVSTPSAAFPSDATAEQGPILTKHGKNPVMELNEKRRGLKYELISETGGSHDKRFVMEVEVDGQKFQGAGSNKKVAKAYAALAALEKLFPDTPLALDANKKKRAPVPVRGGPKFAAKPHNPGFGMGGPMHNEVPPPPNLRGRGRGGSIRGRGRGRGFGGANHGGYMNAGAGYGSYGYGGNSATAGYTGFV

SEQ ID NO: 605 - protein, 765 aa, Homo sapiens [sequence omitted]

SEQ ID NO: 606 - protein, 891 aa, Homo sapiens [sequence omitted]

SEQ ID NO: 607 - protein, 894 aa, Homo sapiens; identical to SEQ ID NO: 602

SEQ ID NO: 608 - protein, 702 aa, Homo sapiens
MRPMRIFVNDDRHVMAKHSSVYPTQEELEAVQNMVSHTERALKAVSDWIDEQEKGSSEQAESDNMDVPPEDDSKEGAGEQKTEHMTRTLRGVMRVGLVAKGLLLKGDLDLELVLLCKEKPTTALLDKVADNLAIQLAAVTEDKYEILQSVDDAAIVIKNTKEPPLSLTIHLTSPVVREEMEKVLAGETLSVNDPPDVLDRQKCLAALASLRHAKWFQARANGLKSCVIVIRVLRDLCTRVPTWGPLRGWPLELLCEKSIGTANRPMGAGEALRRVLECLASGIVMPDGSGIYDPCEKEATDAIGHLDRQQREDITQSAQHALRLAAFGQLHKVLGMDPLPSKMPKKPKNENPVDYTVQIPPSTTYAITPMKRPMEEDGEEKSPSKKKKKIQKKEEKAEPPQAMNALMRLNQLKPGLQYKLVSQTGPVHAPIFTMSVEVDGNSFEASGPSKKTAKLHVAVKVLQDMGLPTGAEGRDSSKGEDSAEETEAKPAVVAPAPVVEAVSTPSAAFPSDATAEQGPILTKHGKNPVMELNEKRRGLKYELISETGGSHDKRFVMEVEVDGQKFQGAGSNKKVAKAYAALAALEKLFPDTPLALDANKKKRAPVPVRGGPKFAAKPHNPGFGMGGPMHNEVPPPPNLRGRGRGGSIRGRGRGRGFGGANHGGYMNAGAGYGSYGYGGNSATAGYSDFFTDCYGYHDFGSS

SEQ ID NO: 609 - protein, 898 aa, Homo sapiens
MRPMRIFVNDDRHVMAKHSSVYPTQEELEAVQNMVSHTERALKAVSDWIDEQEKGSSEQAESDNMDVPPEDDSKEGAGEQKTEHMTRTLRGVMRVGLVAKGLLLKGDLDLELVLLCKEKPTTALLDKVADNLAIQLAAVTEDKYEILQSVDDAAIVIKNTKEPPLSLTIHLTSPVVREEMEKVLAGETLSVNDPPDVLDRQKCLAALASLRHAKWFQARANGLKSCVIVIRVLRDLCTRVPTWGPLRGWPLELLCEKSIGTANRPMGAGEALRRVLECLASGIVMPDGSGIYDPCEKEATDAIGHLDRQQREDITQSAQHALRLAAFGQLHKVLGMDPLPSKMPKKPKNENPVDYTVQIPPSTTYAITPMKRPMEEDGEEKSPSKKKKKIQKKEEKAEPPQAMNALMRLNQLKPGLQYKLVSQTGPVHAPIFTMSVEVDGNSFEASGPSKKTAKLHVAVKVLQDMGLPTGAEGRDSSKGEDSAEETEAKPAVVAPAPVVEAVSTPSAAFPSDATAENVKQQGPILTKHGKNPVMELNEKRRGLKYELISETGGSHDKRFVMEVEVDGQKFQGAGSNKKVAKAYAALAALEKLFPDTPLALDANKKKRAPVPVRGGPKFAAKPHNPGFGMGGPMHNEVPPPPNLRGRGRGGSIRGRGRGRGFGGANHGGYMNAGAGYGSYGYGGNSATAGYSQFYSNGGHSGNASGGGGGGGGGSSGYGSYYQGDNYNSPVPPKHAGKKQPHGGQQKPSYGSGYQSHQGQQQSYNQSPYSNYGPPQGKQKGYNHGQGSYSYSNSYNSPGGGGGSDYNYESKFNYSGSGGRSGGNSYGSGGASYNPGSHGGYGGGSGGGSSYQGKQGGYSQSNYNSPGSGQNYSGPPSSYQSSQGGYGRNADHSMNYQYR

SEQ ID NO: 610 - protein, 894 aa, Homo sapiens; identical to SEQ ID NO: 602

SEQ ID NO: 611 - protein, 437 aa, Homo sapiens
MTANGTAEAVQIQFGLINCGNKYLTAEAFGFKVNASASSLKKKQIWTLEQPPDEAGSAAVCLRSHLGRYLAADKDGNVTCEREVPGPDCRFLIVAHDDGRWSLQSEAHRRYFGGTEDRLSCFAQTVSPAEKWSVHIAMHPQVNIYSVTRKRYAHLSARPADEIAVDRDVPWGVDSLITLAFQDQRYSVQTADHRFLRHDGRLVARPEPATGYTLEFRSGKVAFRDCEGRYLAPSGPSGTLKAGKATKVGKDELFALEQSCAQVVLQAANERNVSTRQGMDLSANQDEETDQETFQLEIDRDTKKCAFRTHTGKYWTLTATGGVQSTASSKNASCYFDIEWRDRRITLRASNGKFVTSKKNGQLAASVETADSTGKYWTVGSDSAVTSSGDTPVDFFFEFCDYNKVAIKVGGRYLKGDHAGVLKASAETVDPASLWEY

SEQ ID NO: 612 - protein, 438 aa, Homo sapiens
MTANGTAEAVQIQFGLINCGNKYLTAEAFGFKVNASASSLKKKQIWTLEQPPDEAGSAAVCLRSHLGRYLAADKDGNVTCEREVPGPDCRFLIVAHDDGRWSLQSEAHRRYFGGTEDRLSCFAQTVSPAEKWSVHIAMHPQVNIYSVTRKRYAHLSARPADEIAVDRDVPWGVDSLITLAFQDQRYSVQTADHRFLRHDGRLVARPEPATGYTLEFRSGKVAFRDCEGRYLAPSGPSGTLKAGKATKVGKDELFALEQSCAQVVLQAANERNVSTRQGMDLSANQDEETDQETFQLEIDRDTKKCAFRTHTGKYWTLTATGGVQSTASSKNASCYFDIEWRDRRITLRASNGKFVTSKKNGQLAASVETAGDSELFLMKLINRPIIVFRGEHGFIGCRKVTGTLDANRSSYDVFQLEFNDGAYNIKGRLHRQILDGGQ

SEQ ID NO: 613 - protein, 97 aa, Homo sapiens
AGSAAVCLRSHLGRYLAADKDGNVTCEREVPGPDCRFLTVAHDDGRWSLQSEAHRRSFGGTEDRLSCFAQTVSPAEKWSVHIAMHPQVNIYRVTPKR

SEQ ID NO: 614 - protein, 97 aa, Homo sapiens; identical to SEQ ID NO: 613

SEQ ID NO: 615 - protein, 492 aa, Homo sapiens
TANGTAEAVQIQFGLINCGNKYLTAEAFGFKVNASASSLKKKQIWTLEQPPDEAGSAAVCLRSHLGRYLAADKDGNVTCEREVPGPDCRFLIVAHDDGRWSLQSEAHRRYFGGTEDRLSCFAQTVSPAEKWSVHIAMHPQVNIYSVTRKRYAHLSARPADEIAVDRDVPWGVDSLITLAFQDQRYSVQTADHRFLRHDGRLVARPEPATGYTLEFRSGKVAFRDCEGRYLAPSGPSGTLKAGKATKVGKDELFALEQSCAQVVLQAANERNVSTRQGMDLSANQDEETDQETFQLEIDRDTKKCAFRTHTGKYWTLTATGGVQSTASSKNASCYFDIEWRDRRITLRASNGKFVTSKKNGQLAASVETAGDSELFLMKLINRPIIVFRGEHGFIGCRKVTGTLDANRSSYDVFQLEFNDGAYNIKDSTGKYWTVGSDSAVTSSGDTPVDFFFEFCDYNKVAIKVGGRYLKGDHAGVLKASAETVDPASLWEY

SEQ ID NO: 616 - protein, 493 aa, Homo sapiens
MTANGTAEAVQIQFGLINCGNKYLTAEAFGFKVNASASSLKKKQIWTLEQPPDEAGSAAVCLRSHLGRYLAADKDGNVTCEREVPGPDCRFLIVAHDDGRWSLQSEAHRRYFGGTEDRLSCFAQTVSPAEKWSVHIAMHPQVNIYSVTRKRYAHLSARPADEIAVDRDVPWGVDSLITLAFQDQRYSVQTADHRFLRHDGRLVARPEPATGYTLEFRSGKVAFRDCEGRYLAPSGPSGTLKAGKATKVGKDELFALEQSCAQVVLQAANERNVSTRQGMDLSANQDEETDQETFQLEIDRDTKKCAFRTHTGKYWTLTATGGVQSTASSKNASCYFDIEWRDRRITLRASNGKFVTSKKNGQLAASVETAGDSELFLMKLINRPIIVFRGEHGFIGCRKVTGTLDANRSSYDVFQLEFNDGAYNIKDSTGKYWTVGSDSAVTSSGDTPVDFFFEFCDYNKVAIKVGGRYLKGDHAGVLKASAETVDPASLWEY

SEQ ID NO: 617 - protein, 356 aa, Homo sapiens
MAAEGWIWRWGWGRRCLGRPGLLGPGPGPTTPLFLLLLLGSVTADITDGNSEHLKREHSLIKPYQGVGSSSMPLWDFQGSTMLTSQYVRLTPDERSKEGSIWNHQPCFLKDWEMHVHFKVHGTGKKNLHGDGIALWYTRDRLVPGPVFGSKDNFHGLAIFLDTYPNDETTERVFPYISVMVNNGSLSYDHSKDGRWTELAGCTADFRNRDHDTFLAVRYSRGRLTVMTDLEDKNEWKNCIDITGVRLPTGYYFGASAGTGDLSDNHDIISMKLFQLMVEHTPDEESIDWTKIEPSVNFLKSPKDNVDDPTGNFRSGPLTGWRVFLLLLCALLGIVVCAVVGAVVFQKRQERNKRFY

SEQ ID NO: 618 - protein, 236 aa, Homo sapiens [sequence omitted]

SEQ ID NO: 619 - protein, 356 aa, Homo sapiens; identical to SEQ ID NO: 617

SEQ ID NO: 620 - protein, 471 aa, Homo sapiens
MPNSEPASLLELFNSIATQGELVRSLKAGNASKDEIDSAVKMLVSLKMSYKAAAGEDYKADCPPGNPAPTSNHGPDATEAEEDFVDPWTVQTSSAKGIDYDKLIVRFGSSKIDKELINRIERATGQRPHHFLRRGIFFSHRDMNQVLDAYENKKPFYLYTGRGPSSEAMHVGHLIPFIFTKWLQDVFNVPLVIQMTDDEKYLWKDLTLDQAYGDAVENAKDIIACGFDINKTFIFSDLDYMGMSSGFYKNVVKIQKHVTFNQVKGIFGFTDSDCIGKISFPAIQAAPSFSNSFPQIFRDRTDIQCLIPCAIDQDPYFRMTRDVAPRIGYPKPALLHSTFFPALQGAQTKMSASDPNSSIFLTDTAKQIKTKVNKHAFSGGRDTIEEHRQFGGNCDVDVSFMYLTFFLEDDDKLEQIRKDYTSGAMLTGELKKALIEVLQPLIAEHQARRKEVTDEIVKEFMTPRKLSFDFQ

SEQ ID NO: 621 - protein, 471 aa, Homo sapiens
MPNSEPASLLELFNSIATQGELVRSLKAGNASKDEIDSAVKMLVSLKMSYKAAAGEDYKADCPPGNPAPTSNHGPDATEAEEDFVDPWTVQTSSAKGIDYDKLIVRFGSSKIDKELINRIERATGQRPHHFLRRGIFFSHRDMNQVLDAYENKKPFYLYTGRGPSSEAMHVGHLIPFIFTKWLQDVFNVPLVIQMTDDEKYLWKDLTLDQAYSYAVENAKDIIACGFDINKTFIFSDLDYMGMSSGFYKNVVKIQKHVTFNQVKGIFGFTDSDCIGKISFPAIQAAPSFSNSFPQIFRDRTDIQCLIPCAIDQDPYFRMTRDVAPRIGYPKPALLHSTFFPALQGAQTKMSASDPNSSIFLTDTAKQIKTKVNKHAFSGGRDTIEEHRQFGGNCDVDVSFMYLTFFLEDDDKLEQIRKDYTSGAMLTGELKKALIEVLQPLIAEHQARRKEVTDEIVKEFMTPRKLSFDFQ

SEQ ID NO: 622 - protein, 471 aa, Homo sapiens; identical to SEQ ID NO: 621

SEQ ID NO: 623 - protein, 471 aa, Homo sapiens; identical to SEQ ID NO: 621

SEQ ID NO: 624 - protein, 471 aa, Homo sapiens; identical to SEQ ID NO: 621

SEQ ID NO: 625 - protein, 471 aa, Homo sapiens; identical to SEQ ID NO: 621

SEQ ID NO: 626 - protein, 471 aa, Homo sapiens; identical to SEQ ID NO: 621

SEQ ID NO: 627 - protein, 471 aa, Homo sapiens; identical to SEQ ID NO: 621

SEQ ID NO: 628 - protein, 95 aa, Homo sapiens
QRYPLPTPKEMLSHESGRHSFLQRDCEYPTLREKKQAHYHKACGAGGCPGITCQPRMQLRLSERSGSEQLQMSPRERLFPVWGVCLPPWPHGASL

SEQ ID NO: 629 - protein, 681 aa, Homo sapiens [sequence omitted]

SEQ ID NO: 630 - protein, 698 aa, Homo sapiens
CGIFAYLNYHVPRTRREILETLIKGLQRLEYRGYDSAGVGFDGGNDKDWEANACKIQLIKKKGKVKALDEEVHKQQDMDLDIEFDVHLGIAHTRWATHGEPSPVNSHPQRSDKNNEFIVIHNGIITNYKDLKKFLESKGYDFESETDTETIAKLVKYMYDNRESQDTSFTTLVERVIQQLEGAFALVFKSVHFPGQAVGTRRGSPLLIGVRSEHKLSTDHIPILYRTARTQIGSKFTRWGSQGERGKDKKGSCNLSRVDSTTCLFPVEEKAVEYYFASDASAVIEHTNRVIFLEDDDVAAVVDGRLSIHRIKRTAGDHPGRAVQTLQMELQQIMKGNFSSFMQKEIFEQPESVVNTMRGRVNFDDYTVNLGGLKDHIKEIQRCRRLILIACGTSYHAGVATRQVLEELTELPVMVELASDFLDRNTPVFRDDVCFFLSQSGETADTLMGLRYCKERGALTVGITNTVGSSISRETDCGVHINAGPEIGVASTKAYTSQFVSLVMFALMMCDDRISMQERRKEIMLGLKRLPDLIKEVLSMDDEIQKLATELYHQKSVLIMGRGYHYATCLEGALKIKEITYMHSEGILAGELKHGPLALVDKLMPVIMIIMRDHTYAKCQNALQQVVARQGRPVVICDKEDTETIKNTKRTIKVPHSVDCLQGILSVIPLQLLAFHLAVLRGYDVDFPRNLAKSVTVE

SEQ ID NO: 631 - protein, 115 aa, Homo sapiens
MPMFIVNTNVPRASVPDGFLSELTQQLAQATGKPPQYIAVHVVPDQLMAFGGSSEPCALCSLHSIGKIGGAQNRSYSKLLCGLLAERLRISPDRVYINYYDMNAANVGWNNSTFA

SEQ ID NO: 632 - protein, 114 aa, Homo sapiens
PMFIVNTNVPRASVPDGFLSELTQQLAQATGKPPQYIAVHVVPDQLMAFGGSSEPCALCSLHSIGKIGGAQNRSYSKLLCGLLAERLRISPDRVYINYYDMNAANVGWNNSTFA

SEQ ID NO: 633 - protein, 115 aa, Homo sapiens; identical to SEQ ID NO: 631

SEQ ID NO: 634 - protein, 2725 aa, Homo sapiens
MMNNSGYSDAGLGLGDETDEMPSTEKDLAEDAPWKKIQQNTFTRWCNEHLKCVGKRLTDLQRDLSDGLRLIALLEVLSQKRMYRKFHPRPNFRQMKLENVSVALEFLEREHIKLVSIDSKAIVDGNLKLILGLIWTLILHYSISMPMWEDEDDEDARKQTPKQRLLGWIQNKVPQLPITNFNRDWQDGKALGALVDNCAPGLCPDWEAWDPNQPVENSREAMQQADDWLGVPQVIAPEEIVDPNVDEHSVMTYLSQFPKAKLKPGAPVRSKQLNPKKAIAYGPGIEPQGNTVLQPAHFTVQTVDAGVGEVLVYIEDPEGHTEEAKVVPNNDKDRTYAVSYVPKVAGLHKVTVLFAGQNIERSPFEVNVGMALGDANKVSARGPGLEPVGNVANKPTYFDIYTAGAGTGDVAVVIVDPQGRRDTVEVALEDKGDSTFRCTYRPAMEGPHTVHVAFAGAPITRSPFPVHVSEACNPNACRASGRGLQPKGVRVKEVADFKVFTKGAGSGELKVTVKGPKGTEEPVKVREAGDGVFECEYYPVVPGKYVVTITWGGYAIPRSPFEVQVSPEAGVQKVRAWGPGLETGQVGKSADFVVEAIGTEVGTLGFSIEGPSQAKIECDDKGDGSCDVRYWPTEPGEYAVHVICDDEDIRDSPFIAHILPAPPDCFPDKVKAFGPGLEPTGCIVDKPAEFTIDARAAGKGDLKLYAQDADGCPIDIKVIPNGNGTFRCSYVPTKPIKHTIIISWGGVNVPKSPFRVNVGEGSHPERVKVYGPGVEKTGLKANEPTYFTVDCSEAGQGDVSIGIKCAPGVVGPAEADIDFDIIKNDNDTFTVKYTPPGAGRYTIMVLFANQEIPASPFHIKVDPSHDASKVKAEGPGLNRTGVEVGKPTHFTVLTKGAGKAKLDVQFAGTAKGEVVRDFEIIDNHDYSYTVKYTAVQQGNMAVTVTYGGDPVPKSPFVVNVAPPLDLSKIKVQGLNSKVAVGQEQAFSVNTRGAGGQGQLDVRMTSPSRRPIPCKLEPGGGAEAQAVRYMPPEEGPYKVDITYDGHPVPGSPFAVEGVLPPDPSKVCAYGPGLKGGLVGTPAPFSIDTKGAGTGGLGLTVEGPCEAKIECQDNGDGSCAVSYLPTEPGEYTINILFAEAHIPGSPFKATIRPVFDPSKVRASGPGLERGKVGEAATFTVDCSEAGEAELTIEILSDAGVKAEVLIHNNADGTYHITYSPAFPGTYTITIKYGGHPVPKFPTRVHVQPAVDTSGVKVSGPGVEPHGVLREVTTEFTVDARSLTATGGNHVTARVLNPSGAKTDTYVTDNGDGTYRVQYTAYEEGVHLVEVLYDEVAVPKSPFRVGVTEGCDPTRVRAFGPGLEGGLVNKANRFTVETRGAGTGGLGLAIEGPSEAKMSCKDNKDGSCTVEYIPFTPGDYDVNITFGGRPIPGSPFRVPVKDVVDPGKVKCSGPGLGAGVRARVPQTFTVDCSQAGRAPLQVAVLGPTGVAEPVEVRDNGDGTHTVHYTPATDGPYTVAVKYADQEVPRSPFKIKVLPAHDASKVRASGPGLNASGIPASLPVEFTIDARDAGEGLLTVQILGPEGKPKKANIRDNGDGTYAVSYLPDMSGRYTITIKYGGDEIPYSPFRIHALPTGDASKCLVTVSIGGHGLGACLGPRIQIGQETVITVDAKAAGEGKVTCTVSTPDGAELDVDVVENHDGTFDIYYTAPEPGKYVITIRFGGEHIPNSPFHVLACDPLPHEEEPSEVPQLRQPYAPPRPGARPTHWATEEPVVPVEPMESMLRPFNLVIPFAVQKGELTGEVRMPSGKTARPNITDNKDGTITVRYAPTEKGLHQMGIKYDGNHIPGSPLQFYVDAINSRHVSAYGPGLSHGMVNKPATFTIVTKDAGEGGLSLAVEGPSKAEITCKDNKDGTCTVSYLPTAPGDYSIIVRFDDKHIPGSPFTAKITGDDSMRTSQLNVGTSTDVSLKITESDLSQLTASIRAPSGNEEPCLLKRLPNRHIGISFTPKEVGEHVVSVRKSGKHVTNSPFKILVGPSEIGDASKVRVWGKGLSEGHTFQVAEFIVDTRNAGYGGLGLSIEGPSKVDINCEDMEDGTCKVTYCPTEPGTYIINIKFADKHVPGSPFTVKVTGEGRMKESITRRRQAPSIATIGSTCDLNLKIPGNWFQMVSAQERLTRTFTRSSHTYTRTERTEISKTRGGETKPEVRVEESTQVGGDPFPAVFGDFLGRERLGSFGSITRQQEGEASSQDMTAQVTSPSGKVEAAEIVEGEDSAYSVRFVPQEMGPHTVAVKYRGQHVPGSPFQFTVGPLGEGGAHKVRAGRAGLERGVAGVPAEFSIWTREAGAGGLSIAVEGPSKAEIAFEDRKDGSCGVSYVVQEPGDYEVSIKFNDEHIPDSPFVVPVASLSDDARRLTVTSLQETGLKVNQPASFAVQLNGARGVIDARVHTPSGAVEECYVSELDSDKHTIRFIPHENGVHSIDVKFNGAHIPGSPFKIRVGEQSQAGDPGLVSAYGPGLEGGTTGVSSEFIVNTLNAGSGALSVTIDGPSKVQLDCRECPEGHVVTYTPMAPGNYLIAIKYGGPQHIVGSPFKAKVTGPRLSGGHSLHETSTVLVETVTKSSSSRGSSYSSIPKFSSDASKVVTRGPGLSQAFVGQKNSFTVDCSKAGTNMMMVGVHGPKTPCEEVYVKHMGNRVYNVTYTVKEKGDYILIVKWGDESVPGSPFKVKVP

SEQ ID NO: 635 - protein, 2705 aa, Homo sapiens
MPSTEKDLAEDAPWKKIQQNTFTRWCNEHLKCVGKRLTDLQRDLSDGLRLIALLEVLSQKRMYRKFHPRPNFRQMKLENVSVALEFLEREHIKLVSIDSKAIVDGNLKLILGLIWTLILHYSISMPMWEDEDDEDARKQTPKQRLLGWIQNKVPQLPITNFNRDWQDGKALGALVDNCAPGLCPDWEAWDPNQPVENSREAMQQADDWLGVPQVIAPEEIVDPNVDEHSVMTYLSQFPKAKLKPGAPVRSKQLNPKKAIAYGPGIEPQGNTVLQPAHFTVQTVDAGVGEVLVYIEDPEGHTEEAKVVPNNDKDRTYAVSYVPKVAGLHKVTVLFAGQNIERSPFEVNVGMALGDANKVSARGPGLEPVGNVANKPTYFDIYTAGAGTGDVAVVIVDPQGRRDTVEVALEDKGDSTFRCTYRPAMEGPHTVHVAFAGAPITRSPFPVHVSEACNPNACRASGRGLQPKGVRVKEVADFKVFTKGAGSGELKVTVKGPKGTEEPVKVREAGDGVFECEYYPVVPGKYVVTITWGGYAIPRSPFEVQVSPEAGVQKVRAWGPGLETGQVGKSADFVVEAIGTEVGTLGFSIEGPSQAKIECDDKGDGSCDVRYWPTEPGEYAVHVICDDEDIRDSPFIAHILPAPPDCFPDKVKAFGPGLEPTGCIVDKPAEFTIDARAAGKGDLKLYAQDADGCPIDIKVIPNGNGTFRCSYVPTKPIKHTIIISWGGVNVPKSPFRVNVGEGSHPERVKVYGPGVEKTGLKANEPTYFTVDCSEAGQGDVSIGIKCAPGVVGPAEADIDFDIIKNDNDTFTVKYTPPGAGRYTIMVLFANQEIPASPFHIKVDPSHDASKVKAEGPGLNRTGVEVGKPTHFTVLTKGAGKAKLDVQFAGTAKGEVVRDFEIIDNHDYSYTVKYTAVQQGNMAVTVTYGGDPVPKSPFVVNVAPPLDLSKIKVQGLNSKVAVGQEQAFSVNTRGAGGQGQLDVRMTSPSRRPIPCKLEPGGGAEAQAVRYMPPEEGPYKVDITYDGHPVPGSPFAVEGVLPPDPSKVCAYGPGLKGGLVGTPAPFSIDTKGAGTGGLGLTVEGPCEAKIECQDNGDGSCAVSYLPTEPGEYTINILFAEAHIPGSPFKATIRPVFDPSKVRASGPGLERGKVGEAATFTVDCSEAGEAELTIEILSDAGVKAEVLIHNNADGTYHITYSPAFPGTYTITIKYGGHPVPKFPTRVHVQPAVDTSGVKVSGPGVEPHGVLREVTTEFTVDARSLTATGGNHVTARVLNPSGAKTDTYVTDNGDGTYRVQYTAYEEGVHLVEVLYDEVAVPKSPFRVGVTEGCDPTRVRAFGPGLEGGLVNKANRFTVETRGAGTGGLGLAIEGPSEAKMSCKDNKDGSCTVEYIPFTPGDYDVNITFGGRPIPGSPFRVPVKDVVDPGKVKCSGPGLGAGVRARVPQTFTVDCSQAGRAPLQVAVLGPTGVAEPVEVRDNGDGTHTVHYTPATDGPYTVAVKYADQEVPRSPFKIKVLPAHDASKVRASGPGLNASGIPASLPVEFTIDARDAGEGLLTVQILGPEGKPKKANIRDNGDGTYAVSYLPDMSGRYTITIKYGGDEIPYSPFRIHALPTGDASKCLVTVSIGGHGLGACLGPRIQIGQETVITVDAKAAGEGKVTCTVSTPDGAELDVDVVENHDGTFDIYYTAPEPGKYVITIRFGGEHIPNSPFHVLACDPLPHEEEPSEVPQLRQPYAPPRPGARPTHWATEEPVVPVEPMESMLRPFNLVIPFAVQKGELTGEVRMPSGKTARPNITDNKDGTITVRYAPTEKGLHQMGIKYDGNHIPGSPLQFYVDAINSRHVSAYGPGLSHGMVNKPATFTIVTKDAGEGGLSLAVEGPSKAEITCKDNKDGTCTVSYLPTAPGDYSIIVRFDDKHIPGSPFTAKITGDDSMRTSQLNVGTSTDVSLKITESDLSQLTASIRAPSGNEEPCLLKRLPNRHIGISFTPKEVGEHVVSVRKSGKHVTNSPFKILVGPSEIGDASKVRVWGKGLSEGHTFQVAEFIVDTRNAGYGGLGLSIEGPSKVDINCEDMEDGTCKVTYCPTEPGTYIINIKFADKHVPGSPFTVKVTGEGRMKESITRRRQAPSIATIGSTCDLNLKIPGNWFQMVSAQERLTRTFTRSSHTYTRTERTEISKTRGGETKPEVRVEESTQVGGDPFPAVFGDFLGRERLGSFGSITRQQEGEASSQDMTAQVTSPSGKVEAAEIVEGEDSAYSVRFVPQEMGPHTVAVKYRGQHVPGSPFQFTVGPLGEGGAHKVRAGRAGLERGVAGVPAEFSIWTREAGAGGLSIAVEGPSKAEIAFEDRKDGSCGVSYVVQEPGDYEVSIKFNDEHIPDSPFVVPVASLSDDARRLTVTSLQETGLKVNQPASFAVQLNGARGVIDARVHTPSGAVEECYVSELDSDKHTIRFIPHENGVHSIDVKFNGAHIPGSPFKIRVGEQSQAGDPGLVSAYGPGLEGGTTGVSSEFIVNTLNAGSGALSVTIDGPSKVQLDCRECPEGHVVTYTPMAPGNYLIAIKYGGPQHIVGSPFKAKVTGPRLSGGHSLHETSTVLVETVTKSSSSRGSSYSSIPKFSSDASKVVTRGPGLSQAFVGQKNSFTVDCSKAGTNMMMVGVHGPKTPCEEVYVKHMGNRVYNVTYTVKEKGDYILIVKWGDESVPGSPFKVKVP

SEQ ID NO: 636 - protein, 2725 aa, Homo sapiens
MMNNSGYSDAGLGLGDETDEMPSTEKDLAEDAPWKKIQQNTFTRWCNEHLKCVGKRLTDLQRDLSDGLRLIALLEVLSQKRMYRKFHPRPNFRQMKLENVSVALEFLEREHIKLVSIDSKAIVDGNLKLILGLIWTLILHYSISMPMWEDEDDEDARKQTPKQRLLGWIQNKVPQLPITNFNRDWQDGKALGALVDNCAPGLCPDWEAWDPNQPVENAREAMQQADDWLGVPQVIAPEEIVDPNVDEHSVMTYLSQFPKAKLKPGAPVRSKQLNPKKAIAYGPGIEPQGNTVLQPAHFTVQTVDAGVGEVLVYIEDPEGHTEEAKVVPNNDKDRTYAVSYVPKVAGLHKVTVLFAGQNIERSPFEVNVGMALGDANKVSARGPGLEPVGNVANKPTYFDIYTAGAGTGDVAVVIVDPQGRRDTVEVALEDKGDSTFRCTYRPAMEGPHTVHVAFAGAPITRSPFPVHVSEACNPNACRASGRGLQPKGVRVKEVADFKVFTKGAGSGELKVTVKGPKGTEEPVKVREAGDGVFECEYYPVVPGKYVVTITWGGYAIPRSPFEVQVSPEAGVQKVRAWGPGLETGQVGKSADFVVEAIGTEVGTLGFSIEGPSQAKIECDDKGDGSCDVRYWPTEPGEYAVHVICDDEDIRDSPFIAHILPAPPDCFPDKVKAFGPGLEPTGCIVDKPAEFTIDARAAGKGDLKLYAQDADGCPIDIKVIPNGDGTFRCSYVPTKPIKHTIIISWGGVNVPKSPFRVNVGEGSHPERVKVYGPGVEKTGLKANEPTYFTVDCSEAGQGDVSIGIKCAPGVVGPAEADIDFDIIKNDNDTFTVKYTPPGAGRYTIMVLFANQEIPASPFHIKVDPSHDASKVKAEGPGLNRTGVEVGKPTHFTVLTKGAGKAKLDVQFAGTAKGEVVRDFEIIDNHDYSYTVKYTAVQQGNMAVTVTYGGDPVPKSPFVVNVAPPLDLSKIKVQGLNSKVAVGQEQAFSVNTRGAGGQGQLDVRMTSPSRRPIPCKLEPGGGAEAQAVRYMPPEEGPYKVDITYDGHPVPGSPFAVEGVLPPDPSKVCAYGPGLKGGLVGTPAPFSIDTKGAGTGGLGLTVEGPCEAKIECQDNGDGSCAVSYLPTEPGEYTINILFAEAHIPGSPFKATIRPVFDPSKVRASGPGLERGKVGEAATFTVDCSEAGEAELTIEILSDAGVKAEVLIHNNADGTYHITYSPAFPGTYTITIKYGGHPVPKFPTRVHVQPAVDTSGVKVSGPGVEPHGVLREVTTEFTVDARSLTATGGNHVTARVLNPSGAKTDTYVTDNGDGTYRVQYTAYEEGVHLVEVLYDEVAVPKSPFRVGVTEGCDPTRVRAFGPGLEGGLVNKANRFTVETRGAGTGGLGLAIEGPSEAKMSCKDNKDGSCTVEYIPFTPGDYDVNITFGGRPIPGSPFRVPVKDVVDPGKVKCSGPGLGAGVRARVPQTFTVDCSQAGRAPLQVAVLGPTGVAEPVEVRDNGDGTHTVHYTPATDGPYTVAVKYADQEVPRSPFKIKVLPAHDASKVRASGPGLNASGIPASLPVEFTIDARDAGEGLLTVQILDPEGKPKKANIRDNGDGTYTVSYLPDMSGRYTITIKYGGDEIPYSPFRIHALPTGDASKCLVTVSIGGHGLGACLGPRIQIGQETVITVDAKAAGEGKVTCTVSTPDGAELDVDVVENHDGTFDIYYTAPEPGKYVITIRFGGEHIPNSPFHVLACDPLPHEEEPSEVPQLRQPYAPPRPGARPTHWATEEPVVPVEPMESMLRPFNLVIPFAVQKGELTGEVRMPSGKTARPNITDNKDGTITVRYAPTEKGLHQMGIKYDGNHIPGSPLQFYVDAINSRHVSAYGPGLSHGMVNKPATFTIVTKDAGEGGLSLAVEGPSKAEITCKDNKDGTCTVSYLPTAPGDYSIIVRFDDKHIPGSPFTAKITGDDSMRTSQLNVGTSTDVSLKITESDLSQLTASIRAPSGNEEPCLLKRLPNRHIGISFTPKEVGEHVVSVRKSGKHVTNSPFKILVGPSEIGDASKVRVWGKGLSEGHTFQVAEFIVDTRNAGYGGLGLSIEGPSKVDINCEDMEDGTCKVTYCPTEPGTYIINIKFADKHVPGSPFTVKVTGEGRMKESITRRRQAPSIATIGSTCDLNLKIPGNWFQMVSAQERLTRTFTRSSHTYTRTERTEISKTRGGETKREVRVEESTQVGGDPFPAVFGDFLGRERLGSFGSITRQQEGEASSQDMTAQVTSPSGKVEAAEIVEGEDSAYSVRFVPQEMGPHTVAVKYRGQHVPGSPFQFTVGPLGEGGAHKVRAGGTGLERGVAGVPAEFSIWTREAGAGGLSIAVEGPSKAEIAFEDRKDGSCGVSYVVQEPGDYEVSIKFNDEHIPDSPFVVPVASLSDDARRLTVTSLQETGLKVNQPASFAVQLNGARGVIDARVHTPSGAVEECYVSELDSDKHTIRFIPHENGVHSIDVKFNGAHIPGSPFKIRVGEQSQAGDPGLVSAYGPGLEGGTTGVSSEFIVNTLNAGSGALSVTIDGPSKVQLDCRECPEGHVVTYTPMAPGNYLIAIKYGGPQHIVGSPFKAKVTGPRLSGGHSLHETSTVLVETVTKSSSSRGSSYSSIPKFSSDASKVVTRGPGLSQAFVGQKNSFTVDCSKAGTNMMMVGVHGPKTPCEEVYVKHMGNRVYNVTYTVKEKGDYILIVKWGDESVPGSPFKVKVP

SEQ ID NO: 637 - protein, 201 aa, Homo sapiens [sequence omitted]

SEQ ID NO: 638 - protein, 517 aa, Homo sapiens
MLRAAARFGPRLGRRLLSAAATQAVPAPNQQPEVFCNQIFINNEWHDAVSRKTFPTVNPSTGEVICQVAEGDKEDVDKAVKAARAAFQLGSPWRRMDASHRGRLLNRLADLIERDRTYLAALETLDNGKPYVISYLVDLDMVLKCLRYYAGWADKYHGKTIPIDGDFFSYTRHEPVGVCGQIIPWNFPLLMQAWKLGPALATGNVVVMKVAEQTPLTALYVANLIKEAGFPPGVVNIVPGFGPTAGAAIASHEDVDKVAFTGSTEIGRVIQVAAGSSNLKRVTLELGGKSPNIIMSDADMDWAVEQAHFALFFNQGQCCCAGSRTFVQEDIYDEFVERSVARAKSRVVGNPFDSKTEQGPQVDETQFKKILGYINTGKQEGAKLLCGGGIAADRGYFIQPTVFGDVQDGMTIAKEEIFGPVMQILKFKTIEEVVGRANNSTYGLAAAVFTKDLDKANYLSQALQAGTVWVNCYDVFGAQSPFGGYKMSGSGRELGEYGLQAYTEVKTVTVKVPQKNS

SEQ ID NO: 639 - protein, 419 aa, Homo sapiens
MDASHRGRLLNRLADLIERDRTYLAALETLDNGKPYVISYLVDLDMVLKCLRYYAGWADKYHGKTIPIDGDFFSYTRHEPVGVCGQIIPWNFPLLMQAWKLGPALATGNVVVMKVAEQTPLTALYVANLIKEAGFPPGVVNIVPGFGPTAGAAIASHEDVDKVAFTGSTEIGRVIQVAAGSSNLKRVTLELGGKSPNIIMSDADMDWAVEQAHFALFFNQGQCCCAGSRTFVQEDIYDEFVERSVARAKSRVVGNPFDSKTEQGPQVDETQFKKILGYINTGKQEGAKLLCGGGIAADRGYFIQPTVFGDVQDGMTIAKEEIFGPVMQILKFKTIEEVVGRANNSTYGLAAAVFTKDLDKANYLSQALQAGTVWVNCYDVFGAQSPFGGYKMSGSGRELGEYGLQAYTEVTVKVPQKNS

SEQ ID NO: 640 - protein, 517 aa, Homo sapiens; identical to SEQ ID NO: 638

SEQ ID NO: 641 - protein, 607 aa, Homo sapiens
MEAPAAGLFLLLLLGTWAPAPGSASSEAPPLINEDVKRTVDLSSHLAKVTAEVVLAHLGGGSTSRATSFLLALEPELEARLAHLGVQVKGEDEEENNLEVRETKIKGKSGRFFTVKLPVALDPGAKISVIVETVYTHVLHPYPTQITQSEKQFVVFEGNHYFYSPYPTKTQTMRVKLASRNVESYTKLGNPTRSEDLLDYGPFRDVPAYSQDTFKVHYENNSPFLTITSMTRVIEVSHWGNIAVEENVDLKHTGAVLKGPFSRYDYQRQPDSGISSIRSFKTILPAAAQDVYYRDEIGNVSTSHLLILDDSVEMEIRPRFPLFGGWKTHYIVGYNLPSYEYLYNLGDQYALKMRFVDHVFDEQVIDSLTVKIILPEGAKNIEIDSPYEISRAPDELHYTYLDTFGRPVIVAYKKNLVEQHIQDIVVHYTFNKVLMLQEPLLVVAAFYILFFTVIIYVRLDFSITKDPAAEARMKVACITEQVLTLVNKRIGLYRHFDETVNRYKQSRDISTLNSGKKSLETEHKALTSEIALLQSRLKTEGSDLCDRVSEMQKLDAQVKELVLKSAVEAERLVAGKLKKDTYIENEKLISGKRQELVTKIDHILDAL

SEQ ID NO: 642 - protein, 607 aa, Homo sapiens; identical to SEQ ID NO: 641

SEQ ID NO: 643 - protein, 607 aa, Homo sapiens; identical to SEQ ID NO: 641

SEQ ID NO: 644 - protein, 212 aa, Homo sapiens
MAYAYLFKYIIIGDTGVGKSCLLLQFTDKRFQPVHDLTIGVEFGARMITIDGKQIKLQIWDTAGQESFRSITRSYYRGAAGALLVYDITRRDTFNHLTTWLEDARQHSNSNMVIMLIGNKSDLESRREVKKEEGEAFAREHGLIFMETSAKTASNVEEAFINTAKEIYEKIQEGVFDINNEANGIKIGPQHAATNATHAGNQGGQQAGGGCC

SEQ ID NO: 645 - protein, 212 aa, Homo sapiens; identical to SEQ ID NO: 644

SEQ ID NO: 646 - protein, 216 aa, Homo sapiens
MTYAYLFKYIIIGDTGVGKSCLLLQFTDKRFQPVHDLTIGVEFGARMVNIDGKQIKLQIWDTAGQESFRSITRSYYRGAAGALLVYDITRRETFNHLTSWLEDARQHSSSNMVIMLIGNKSDLESRRDVKREEGEAFAREHGLIFMETSAKTACNVEEAFINTAKEIYRKIQQGLFDVHNEANGIKIGPQQSISTSVGPSASQRNSRDIGSNSGCC

SEQ ID NO: 647 - protein, 212 aa, Homo sapiens; identical to SEQ ID NO: 644

SEQ ID NO: 648 - protein, 108 aa, Homo sapiens
PSGGSPSRLGRAFEAPKLGGGGGAHFVGWAIRDGRGGSGRPGAGLGSPPSLVREVHTLEGVPGLRDSGSVLSLSGVGKSCLLLQFTDKRFQPVHDLTIGKCIYLFQNR

SEQ ID NO: 649 - protein, 216 aa, Homo sapiens; identical to SEQ ID NO: 646

SEQ ID NO: 650 - protein, 216 aa, Homo sapiens; identical to SEQ ID NO: 646

SEQ ID NO: 651 - protein, 664 aa, Homo sapiens
MDSSTWSPKTTAVTRPVETHELIRNAADISIIVIYFVVVMAVGLWAMFSTNRGTVGGFFLAGRSMVWWPIGASLFASNIGSGHFVGLAGTGAASGIAIGGFEWNALVLVVVLGWLFVPIYIKAGVVTMPEYLRKRFGGQRIQVYLSLLSLLLYIFTKISADIFSGAIFINLALGLNLYLAIFLLLAITALYTITGGLAAVIYTDTLQTVIMLVGSLILTGFAFHEVGGYDAFMEKYMKAIPTIVSDGNTTFQEKCYTPRADSFHIFRDPLTGDLPWPGFIFGMSILTLWYWCTDQVIVQRCLSAKNMSHVKGGCILCGYLKLMPMFIMVMPGMISRILYTEKIACVVPSECEKYCGTKVGCTNIAYPTLVVELMPNGLRGLMLSVMLASLMSSLTSIFNSASTLFTMDIYAKVRKRASEKELMIAGRLFILVLIGISIAWVPIVQSAQSGQLFDYIQSITSYLGPPIAAVFLLAIFWKRVNEPGAFWGLILGLLIGISRMITEFAYGTGSCMEPSNCPTIICGVHYLYFAIILFAISFITIVVISLLTKPIPDVHLYRLCWSLRNSKEERIDLDAEEENIQEGPKETIEIETQVPEKKKGIFRRAYDLFCGLEQHGAPKMTEEEEKAMKMKMTDTSEKPLWRTVLNVNGIILVTVAVFCHAYFA

SEQ ID NO: 652 - protein, 664 aa, Homo sapiens; identical to SEQ ID NO: 651

SEQ ID NO: 653 - protein, 641 aa, Homo sapiens
MAKAAAIGIDLGTTYSCVGVFQHGKVEIIANDQGNRTTPSYVAFTDTERLIGDAAKNQVALNPQNTVFDAKRLIGRKFGDPVVQSDMKHWPFQVINDGDKPKVQVSYKGETKAFYPEEISSMVLTKMKEIAEAYLGYPVTNAVITVPAYFNDSQRQATKDAGVIAGLNVLRIINEPTAAAIAYGLDRTGKGERNVLIFDLGGGTFDVSILTIDDGIFEVKATAGDTHLGGEDFDNRLVNHFVEEFKRKHKKDISQNKRAVRRLRTACERAKRTLSSSTQASLEIDSLFEGIDFYTSITRARFEELCSDLFRSTLEPVEKALRDAKLDKAQIHDLVLVGGSTRIPKVQKLLQDFFNGRDLNKSINPDEAVAYGAAVQAAILMGDKSENVQDLLLLDVAPLSLGLETAGGVMTALIKRNSTIPTKQTQIFTTYSDNQPGVLIQVYEGERAMTKDNNLLGRFELSGIPPAPRGVPQIEVTFDIDANGILNVTATDKSTGKANKITITNDKGRLSKEEIERMVQEAEKYKAEDEVQRERVSAKNALESYAFNMKSAVEDEGLKGKISEADKKKVLDKCQEVISWLDANTLAEKDEFEHKRKELEQVCNPIISGLYQGAGGPGPGGFGAQGPKGGSGSGPTIEEVD

SEQ ID NO: 654 - protein, 643 aa, Homo sapiens
MQAPRELAVGIDLGTTYSCVGVFQQGRVEILANDQGNRTTPSYVAFTDTERLVGDAAKSQAALNPHNTVFDAKRLIGRKFADTTVQSDMKHWPFRVVSEGGKPKVPVSYRGEDKTFYPEEISSMVLSKMKETAEAYLGQPVKHAVITVPAYFNDSQRQATKDAGAIAGLNVLRIINEPTAAAIAYGLDRRGAGERNVLIFDLGGGTFDVSVLSIDAGVFEVKATAGDTHLGGEDFDNRLVNHFMEEFRRKHGKDLSGNKRALGRLRTACERAKRTLSSSTQATLEIDSLFEGVDFYTSITRARFEELCSDLFRSTLEPVEKALRDAKLDKAQIHDVVLVGGSTRIPKVQKLLQDFFNGKELNKSINPDEAVAYGAAVQAAVLMGDKCEKVQDLLLLDVAPLSLGLETAGGVMTTLIQRNATIPTKQTQTFTTYSDNQPGVFIQVYEGERAMTKDNNLLGRFELSGIPPAPRGVPQIEVTFDIDANGILSVTATDRSTGKANKITITNDKGRLSKEEVERMVHEAEQYKAEDEAQRDRVAAKNSLEAHVFHVKGSLQEESLRDKIPEEDRRKMQDKCREVLAWLEHNQLAEKEEYEHQKRELEQICRPIFSRLYGGPGVPGGSSCGTQARQGDPSTGPIIEEVD

SEQ ID NO: 655 - protein, 641 aa, Homo sapiens; identical to SEQ ID NO: 653

SEQ ID NO: 656 - protein, 643 aa, Homo sapiens
MQAPRELAVGIDLGTTYSCVGVFQQGRVEILANDQGNRTTPSYVAFTDTERLVGDAAKSQAALNPHNTVFDAKRLIGRKFADTTVQSDMKHWPFRVVSEGGKPKVRVCYRGEDKTFYPEEISSMVLSKMKETAEAYLGQPVKHAVITVPAYFNDSQRQATKDAGAIAGLNVLRIINEPTAAAIAYGLDRRGAGERNVLIFDLGGGTFDVSVLSIDAGVFEVKATAGDTHLGGEDFDNRLVNHFMEEFRRKHGKDLSGNKRALRRLRTACERAKRTLSSSTQATLEIDSLFEGVDFYTSITRARFEELCSDLFRSTLEPVEKALRDAKLDKAQIHDVVLVGGSTRIPKVQKLLQDFFNGKELNKSINPDEAVAYGAAVQAAVLMGDKCEKVQDLLLLDVAPLSLGLETAGGVMTTLIQRNATIPTKQTQTFTTYSDNQPGVFIQVYEGERAMTKDNNLLGRFELSGIPPAPRGVPQIEVTFDIDANGILSVTATDRSTGKANKITITNDKGRLSKEEVERMVHEAEQYKAEDEAQRDRVAAKNSLEAHVFHVKGSLQEESLRDKIPEEDRRKMQDKCREVLAWLEHNQLAEKEEYEHQKRELEQICRPIFSRLYGGPGVPGGSSCGTQARQGDPSTGPIIEEVD

SEQ ID NO: 657 - protein, 641 aa, Homo sapiens
MAKAAAIGIDLGTTYSCVGVFQHGKVEIIANDQGNRTTPSYVAFTDTERLIGDAAKNQVALNPQNTVFDAKRLIGRKFGDPVVQSDMKHWPFQVINDGDKPKVQVSYKGETKAFYPEEISSMVLTKMKEIAEAYLGYPVTNAVITVPAYFNDSQRQATKDAGVIAGLNVLRIINEPTAAAIAYGLDRTGKGERNVLIFDLGGGTFDVSILTIDDGIFEVKATAGDTHLGGEDFDNRLVNHFVEEFKRKHKKDISQNKRAVRRLRTACERAKRTLSSSTQASLEIDSLFEGIDFYTSITRARFEELCSDLFRSTLEPVEKALRDAKLDKAQIHDLVLVGGSTRIPKVQKLLQDFFNGRDLNKSINPDEAVAYGAAVQAAILMGDKSENVQDLLLLDVAPLSLGLETAGGVMTALIKRNSTIPTKQTQIFTTYSDNQPGVLIQVYEGERAMTKDNNLLGRFELSGIPPAPRGVPQIEVTFDIDANGILNVTATDKSTGKASKITITNDKGRLSKEEIERMVQEAEKYKAEDEVQRERVSAKNALESYAFNMKSAVEDEGLKGKISEADKKKVLDKCQEVISWLDANTLAEKDEFEHKRKELEQVCNPIISGLYQGAGGPGPGGFGAQGPKGGSGSGPTIEEVD

SEQ ID NO: 658 - protein, 641 aa, Homo sapiens; identical to SEQ ID NO: 653

SEQ ID NO: 659 - protein, 367 aa, Homo sapiens
MQAPRELAVGIDLGTTYSCVGVFQQGRVEILANDQGNRTTPSYVAFTDTERLVGDAAKSQAALNPHNTVFDAKRLIGRKFADTTVQSDMKHWPFQVVSEGGKPKVRVCYRGEDKTFYPEEISSMVLSKMKETAEAYLGQPVKHAVITVPTYFSNSQRQATKDAGAIAGLKVLPIINEATAAAIAYGLDRRGAGKRNVLIFDLGGGTFDVSVLSIDAGVFEVKATAGDTHLGGEDFDNRLVNHFMEEFRRKHGKDLSGNKRALRRLRTACERAKRTPSSSTQATLEIDSLFEGVDFYKSITRARFEELCSDLFRSTLEPVEKALRDAKLDKAQIHDFVLGGGLHSHPQGAEVAAGLLQRQGAEQEHQP

SEQ ID NO: 660 - protein, 703 aa, Homo sapiens
MTKFGFLRLSYEKQDTLLKLLILSMAAVLSFSTRLFAVLRFESVIHEFDPYFNYRTTRFLAEEGFYKFHNWFDDRAWYPLGRIIGGTIYPGLMITSAAIYHVLHFFHITIDIRNVCVFLAPLFSSFTTIVTYHLTKELKDAGAGLLAAAMIAVVPGYISRSVAGSYDNEGIAIFCMLLTYYMWIKAVKTGSICWAAKCALAYFYMVSSWGGYVFLINLIPLHVLVLMLTGRFSHRIYVAYCTVYCLGTILSMQISFVGFQPVLSSEHMAAFGVFGLCQIHAFVDYLRSKLNPQQFEVLFRSVISLVGFVLLTVGALLMLTGKISPWTGRFYSLLDPSYAKNNIPIIASVSEHQPTTWSSYYFDLQLLVFMFPVGLYYCFSNLSDARIFIIMYGVTSMYFSAVMVRLMLVLAPVMCILSGIGVSQVLSTYMKNLDISRPDKKSKKQQDSTYPIKNEVASGMILVMAFFLITYTFHSTWVTSEAYSSPSIVLSARGGDGSRIIFDDFREAYYWLRHNTPEDAKVMSWWDYGYQITAMANRTILVDNNTWNNTHISRVGQAMASTEEKAYEIMRELDVSYVLVIFGGLTGYSSDDINKFLWMVRIGGSTDTGKHIKENDYYTPTGEFRVDREGSPVLLNCLMYKMCYYRFGQVYTEAKRPPGFDRVRNAEIGNKDFELDVLEEAYTTEHWLVRIYKTLFDFINQQF

SEQ ID NO: 661 - protein, 705 aa, Homo sapiens
MTKFGFLRLSYEKQDTLLKLLILSMAAVLSFSTRLFAVLRFESVIHEFDPYFNYRTTRFLAEEGFYKFHNWFDDRAWYPLGRIIGGTIYPGLMITSAAIYHVLHFFHITIDIRNVCVFLAPLFSSFTSIVTYLLTKELKDAGAGLLAAAMIAVVPGYISRSVAGSYDNEGIAIFCMLLTYYMWIKAVKTGSICWAAKCALAYFYMVSSWGGYVFLINLIPLHVLVLMLTGRFSHRIYVAYCTVYCLGTILSRQISFVGFQPVLSSEHMAGFGVFGLCQIHAFVDYLRSKLNPQQFEVLFRSVISLVGFVLLTVGALLMLTGKISPWTGRFYSLLDPSYAKNNIPIIASVSEHQPTTWSSYYFDLQLLVFMFPVGLYYCFSNLSDARIFIIMYGVTSMYFSAVMVRLMLVLAPVMSILSGIGVSQVLSTYMKNLDISRPDKKSKKQQDSTYPIKIEVASGMILVMAFFLITYTFHSTWVTSEAYSSPSIVLSARGGDGSRIIFDDFREAYYWLRHNTPEDAKVMSWWDYGYQITAMANRTILVDNNTWNNTHISRVGQAMASTEEKAYEIMRELDVSYVLVIFGGLTGYSSDDINKFLWMVRIGGSTDTGKHIKENDYYTPTGEFRVDREGSPVLLNCLMYKMCYYRFGQVYTEAKRPPGFDRVRNAEIGNKDFELDVLEEGYTTEHWLVRIYKVKDLDNRGLSRT

SEQ ID NO: 662 - protein, 705 aa, Homo sapiens
MTKFGFLRLSYEKQDTLLKLLILSMAAVLSFSTRLFAVLRFESVIHEFDPYFNYRTTRFLAEEGFYKFHNWFDDRAWYPLGRIIGGTIYPGLMITSAAIYHVLHFFHITIDIRNVCVFLAPLFSSFTTIVTYHLTKELKDAGAGLLAAAMIAVVPGYISRSVAGSYDNEGIAIFCMLLTYYMWIKAVKTGSICWAAKCALAYFYMVSSWGGYVFLINLIPLHVLVLMLTGRFSHRIYVAYCTVYCLGTILSMQISFVGFQPVLSSEHMAAFGVFGLCQIHAFVDYLRSKLNPQQFEVLFRSVISLVGFVLLTVGALLMLTGKISPWTGRFYSLLDPSYAKNNIPIIASVSEHQPTTWSSYYFDLQLLVFMFPVGLYYCFSNLSDARIFIIMYGVTSMYFSAVMVRLMLVLAPVMCILSGIGVSQVLSTYMKNLDISRPDKKSKKQQDSTYPIKNEVASGMILVMAFFLITYTFHSTWVTSEAYSSPSIVLSARGGDGSRIIFDDFREAYYWLRHNTPEDAKVMSWWDYGYQITAMANRTILVDNNTWNNTHISRVGQAMASTEEKAYEIMRELDVSYVLVIFGGLTGYSSDDINKFLWMVRIGGSTDTGKHIKENDYYTPTGEFRVDREGSPVLLNCLMYKMCYYRFGQVYTEAKRPPGFDRVRNAEIGNKDFELDVLEEAYTTEHWLVRIYKVKDLDNRGLSRT

SEQ ID NO: 663 - protein, 703 aa, Homo sapiens; identical to SEQ ID NO: 660

SEQ ID NO: 664 - protein, 219 aa, Homo sapiens
MGYFRCAGAGSFGRRRKMEPSTAARAWALFWLLLPLLGAVCASGPRTLVLLDNLNVRETHSLFFRSLKDRGFELTFKTADDPSLSLIKYGEFLYDNLIIFSPSVEDFGGNINVETISAFIDGGGSVLVAASSDIGDPLRELGSECGIEFDEEKTAVIDHHNYDISDLGQHTLIVADTENLLKAPTIVGKSSLNPIPSPHSVETGQGGGLLGLVVLFCFV

SEQ ID NO: 665 - protein, 456 aa, Homo sapiens
MGYFRCAGAGSFGRRRKMEPSTAARAWALFWLLLPLLGAVCASGPRTLVLLDNLNVRETHSLFFRSLKDRGFELTFKTADDPSLSLIKYGEFLYDNLIIFSPSVEDFGGNINVETISAFIDGGGSVLVAASSDIGDPLRELGSECGIEFDEEKTAVIDHHNYDISDLGQHTLIVADTENLLKAPTIVGKSSLNPILFRGVGMVADPDNPLVLDILTGSSTSYSFFPDKPITQYPHAVGKNTLLIAGLQARNNARVIFSGSLDFFSDSFFNSAVQKAAPGSQRYSQTGNYELAVALSRWVFKEEGVLRVGPVSHHRVGETAPPNAYTVTDLVEYSIVIQQLSNGKWVPFDGDDIQLEFVRIDPFVRTFLKKKGGKYSVQFKLPDVYGVFQFKVDYNRLGYTHLYSSTQVSVRPLQHTQYERFIPSAYPYYASAFPMMLGLFIFSIVFLHMKEKEKSD

SEQ ID NO: 666 - protein, 456 aa, Homo sapiens
MGYFRCAGAGSFGRRRKMEPSTAARAWALFWLLLPLLGAVCASGPRTLVLLDNLNVRETHSLFFRSLKDRGFELTFKTADDPSLSLIKYGEFLYDNLIIFSPSVEDFGGNINVETISAFIDGGGSVLVAASSDIGDPLRELGSECGIEFDEEKTAVIDHHNYDISDLGQHTLIVADTENLLKAPTIVGKSSLNPILFRGVGMVADPDNPLVLDILTGSSTSYSFFPDKPITQYPHAVGKNTLLIAGLQARNNARVIFSGSLDFFSDSFFNSAVQKAAPGSQRYSQTGNYELAVALSRWVFKEEGVLRVGPVSHHRVGETAPPNAYTVTDLVEYSIVIQQLSNGKWVPFDGDDIQLEFVRIDPFVRTFLKKKGGKYSVQFKLPDVYGVFQFKVDYNRLGYTHLYSSTQVSVRPLQHTQYERFIPSAYPYYASAFSMMLGLFIFSIVFLHMKEKEKSD

SEQ ID NO: 667 - protein, 456 aa, Homo sapiens; identical to SEQ ID NO: 666

SEQ ID NO: 668 - protein, 2432 aa, Homo sapiens
MLGLLVQFCTSHKEMDVSALLDFYMKNILMSKVKPPKYLLDSCAPLLRYLSHSEFKDLILPTIQKSLLRSPENVIETISSLLASVTLDLSQYAMDIVKGLAGHLKSNSPRLMDEAVLALRNLARQCSDSSAMESLTKHLFAILGGSEGKLTVVAQKMSVLSGIGSVSHHVVSGPSSQVLNGIVAELFIPFLQQEVHEGTLVHAVSVLALWCNRFTMEVPKKLTEWFKKAFSLKTSTSAVRHAYLQCMLASYRGDTLLQALDLLPLLIQTVEKAASQSTQVPTITEGVAAALLLLKLSVADSQAEAKLSSFWQLIVDEKKQVFTSEKFLVMASEDALCTVLHLTERLFLDHPHRLTGNKVQQYHRALVAVLLSRTWHVRRQAQQTVRKLLSSLGGFKLAHGLLEELKTVLSSHKVLPLEALVTDAGEVTEAGKAYVPPRVLQEALCVISGVPGLKGDVTDTEQLAQEMLIISHHPSLGPWLRWSSMNAMGSLSVLSPDRVLPQLISTITASVQNPALRLVTREEFAIMQTPAGELYDKSIIQSAQQDSIKKANMKRENKAYSFKEQIIELELKEEIKKKKGIKEEVQLTSKQKEMLQAQLDREAQVRRRLQELDGELEAALGLLDIILAKNPSGLTQYIPVLVDSFLPLLKSPLAAPRIKNPFLSLAACVMPSRLKALGTLVSHVTLRLLKPECVLDKSWCQEELSVAVKRAVMLLHTHTITSRVGKGEPGAAPLSAPAFSLVFPFLKMVLTEMPHHSEEEEEWMAQILQILTVQAQLRASPNTPPGRVDENGPELLPRVAMLRLLTWVIGTGSPRLQVLASDTLTTLCASSSGDDGCAFAEQEEVDVLLCALQSPCASVRETVLRGLMELHMVLPAPDTDEKNGLNLLRRLWVVKFDKEEEIRKLAERLWSMMGLDLQPDLCSLLIDDVIYHEAAVRQAGAEALSQAVARYQRQAAEVMGRLMEIYQEKLYRPPPVLDALGRVISESPPDQWEARCGLALALNKLSQYLDSSQVKPLFQFFVPDALNDRHPDVRKCMLDAALATLNTHGKENVNSLLPVFEEFLKNAPNDASYDAVRQSVVVLMGSLAKHLDKSDPKVKPIVAKLIAALSTPSQQVQESVASCLPPLVPAIKEDAGGMIQRLMQQLLESDKYAERKGAAYGLAGLVKGLGILSLKQQEMMAALTDAIQDKKNFRRREGALFAFEMLCTMLGKLFEPYVVHVLPHLLLCFGDGNQYVREAADDCAKAVMSNLSAHGVKLVLPSLLAALEEESWRTKAGSVELLGAMAYCAPKQLSSCLPNIVPKLTEVLTDSHVKVQKAGQQALRQIGSVIRNPEILAIAPVLLDALTDPSRKTQKCLQTLLDTKFVHFIDAPSLALIMPIVQRAFQDRSTDTRKMAAQIIGNMYSLTDQKDLAPYLPSVTPGLKASLLDPVPEVRTVSAKALGAMVKGMGESCFEDLLPWLMETLTYEQSSVDRSGAAQGLAEVMAGLGVEKLEKLMPEIVATASKVDIAPHVRDGYIMMFNYLPITFGDKFTPYVGPIIPCILKALADENEFVRDTALRAGQRVISMYAETAIALLLPQLEQGLFDDLWRIRFSSVQLLGDLLFHISGVTGKMTTETASEDDNFGTAQSNKAIITALGVERRNRVLAGLYMGRSDTQLVVRQASLHVWKIVVSNTPRTLREILPTLFGLLLGFLASTCADKRTIAARTLGDLVRKLGEKILPEIIPILEEGLRSQKSDERQGVCIGLSEIMKSTSRDAVLYFSESLVPTARKALCDPLEEVREAAAKTFEQLHSTIGHQALEDILPFLLKQLDDEEVSEFALDGLKQVMAIKSRVVLPYLVPKLTTPPVNTRVLAFLSSVAGDALTRHLGVILPAVMLALKEKLGTPDEQLEMANCQAVILSVEDDTGHRIIIEDLLEATRSPEVGMRQAAAIILNIYCSRSKADYTSHLRSLVSGLIRLFNDSSPVVLEESWDALNAITKKLDAGNQLALIEELHKEIRLIGNESKGEHVPGFCLPKKGVTSILPVLREGVLTGSPEQKEEAAKALGLVIRLTSADALRPSVVSITGPLIRILGDRFSWNVKAALLETLSLLLAKVGIALKPFLPQLQTTFTKALQDSNRGVRLKAADALGKLISIHIKVDPLFTELLNGIRAMEDPGVRDTMLQALRFVIQGAGAKVDAVIRKNIVSLLLSMLGHDEDNTRISSAGCLGELCAFLTEEELSAVLQQCLLADVSGIDWMVRHGRSLALSVAVNVAPGRLCAGRYSSDVQEMILSSATADRIPIAVSGVRGMGFLMRHHIETGGGQLPAKLSSLFVKCLQNPSSDIRLVAEKMIWWANKDPLPPLDPQAIKPILKALLDNTKDKNTVVRAYSDQAIVNLLKMRQGEEVFQSLSKILDVASLEVLNEVNRRSLKKLASQADSTEQVDDTILT

SEQ ID NO: 669 - protein, 2468 aa, Homo sapiens
MLGLLVQFCTSHKEMDVSALLDFYMKNILMSKVKPPKYLLDSCAPLLRYLSHSEFKDLILPTIQKSLLRSPENVIETISSLLASVTLDLSQYAMDIVKGLAGHLKSNSPRLMDEAVLALRNLARQCSDSSAMESLTKHLFAILGGSEGKLTVVAQKMSVLSGIGSVSHHVVSGPSSQVLNGIVAELFIPFLQQEVHEGTLVHAVSVLALWCNRFTMEVPKKLTEWFKKAFSLKTSTSAVRHAYLQCMLASYRGDTLLQALDLLPLLIQTVEKAASQSTQVPTITEGVAAALLLLKLSVADSQAEAKLSSFWQLIVDEKKQVFTSEKFLVMASEDALCTVLHLTERLFLDHPHRLTGNKVQQYHRALVAVLLSRTWHVRRQAQQTVRKLLSSLGGFKLAHGLLEELKTVLSSHKVLPLEALVTDAGEVTEAGKAYVPPRVLQEALCVISGVPGLKGDVTDTEQLAQEMLIISHHPSLVAVQSGLWPALLARMKIDPEAFITRHLDQIIPRMTTQSPLNQSSMNAMGSLSVLSPDRVLPQLISTITASVQNPALRLVTREEFAIMQTPAGELYDKSIIQSAQQDSIKKANMKRENKAYSFKEQIIELELKEEIKKKKGIKEEVQLTSKQKEMLQAQLDREAQVRRRLQELDGELEAALGLLDIILAKNPSGLTQYIPVLVDSFLPLLKSPLAAPRIKNPFLSLAACVMPSRLKALGTLVSHVTLRLLKPECVLDKSWCQEELSVAVKRAVMLLHTHTITSRVGKGEPGAAPLSAPAFSLVFPFLKMVLTEMPHHSEEEEEWMAQILQILTVQAQLRASPNTPPGRVDENGPELLPRVAMLRLLTWVIGTGSPRLQVLASDTLTTLCASSSGDDGCAFAEQEEVDVLLCALQSPCASVRETVLRGLMELHMVLPAPDTDEKNGLNLLRRLWVVKFDKEEEIRKLAERLWSMMGLDLQPDLCSLLIDDVIYHEAAVRQAGAEALSQAVARYQRQAAEVMGRLMEIYQEKLYRPPPVLDALGRVISESPPDQWEARCGLALALNKLSQYLDSSQVKPLFQFFVPDALNDRHPDVRKCMLDAALATLNTHGKENVNSLLPVFEEFLKNAPNDASYDAVRQSVVVLMGSLAKHLDKSDPKVKPIVAKLIAALSTPSQQVQESVASCLPPLVPAIKEDAGGMIQRLMQQLLESDKYAERKGAAYGLAGLVKGLGILSLKQQEMMAALTDAIQDKKNFRRREGALFAFEMLCTMLGKLFEPYVVHVLPHLLLCFGDGNQYVREAADDCAKAVMSNLSAHGVKLVLPSLLAALEEESWRTKAGSVELLGAMAYCAPKQLSSCLPNIVPKLTEVLTDSHVKVQKAGQQALRQIGSVIRNPEILAIAPVLLDALTDPSRKTQKCLQTLLDTKFVHFIDAPSLALIMPIVQRAFQDRSTDTRKMAAQIIGNMYSLTDQKDLAPYLPSVTPGLKASLLDPVPEVRTVSAKALGAMVKGMGESCFEDLLPWLMETLTYEQSSVDRSGAAQGLAEVMAGLGVEKLEKLMPEIVATASKVDIAPHVRDGYIMMFNYLPITFGDKFTPYVGPIIPCILKALADENEFVRDTALRAGQRVISMYAETAIALLLPQLEQGLFDDLWRIRFSSVQLLGDLLFHISGVTGKMTTETASEDDNFGTAQSNKAIITALGVERRNRVLAGLYMGRSDTQLVVRQASLHVWKIVVSNTPRTLREILPTLFGLLLGFLASTCADKRTIAARTLGDLVRKLGEKILPEIIPILEEGLRSQKSDERQGVCIGLSEIMKSTSRDAVLYFSESLVPTARKALCDPLEEVREAAAKTFEQLHSTIGHQALEDILPFLLKQLDDEEVSEFALDGLKQVMAIKSRVVLPYLVPKLTTPPVNTRVLAFLSSVAGDALTRHLGVILPAVMLALKEKLGTPDEQLEMANCQAVILSVEDDTGHRIIIEDLLEATRSPEVGMRQAAAIILNIYCSRSKADYTSHLRSLVSGLIRLFNDSSPVVLEESWDALNAITKKLDAGNQLALIEELHKEIRLIGNESKGEHVPGFCLPKKGVTSILPVLREGVLTGSPEQKEEAAKALGLVIRLTSADALRPSVVSITGPLIRILGDRFSWNVKAALLETLSLLLAKVGIALKPFLPQLQTTFTKALQDSNRGVRLKAADALGKLISIHIKVDPLFTELLNGIRAMEDPGVRDTMLQALRFVIQGAGAKVDAVIRKNIVSLLLSMLGHDEDNTRISSAGCLGELCAFLTEEELSAVLQQCLLADVSGIDWMVRHGRSLALSVAVNVAPGRLCAGRYSSDVQEMILSSATADRIPIAVSGVRGMGFLMRHHIETGGGQLPAKLSSLFVKCLQNPSSDIRLVAEKMIWWANKDPLPPLDPQAIKPILKALLDNTKDKNTVVRAYSDQAIVNLLKMRQGEEVFQSLSKILDVASLEVLNEVNRRSLKKLASQADSTEQVDDTILT

SEQ ID NO: 670 - protein, 2432 aa, Homo sapiens; identical to SEQ ID NO: 668

SEQ ID NO: 671 - protein, 2671 aa, Homo sapiens
MAADTQVSETLKRFAGKVTTASVKERREILSELGKCVAGKDLPEGAVKGLCKLFCLTLHRYRDAASRRALQAAIQQLAEAQPEATAKNLLHSLQSSGIGSKAGVPSKSSGSAALLALTWTCLLVRIVFPSRAKRQGDIWNKLVEVQCLLLLEVLGGSHKHAVDGAVKKLTKLWKENPGLVEQYLSAILSLEPNQNYAGMLGLLVQFCTSHKEMDVVSQHKSALLDFYMKNILMSKVKPPKYLLDSCAPLLRYLSHSEFKDLILPTIQKSLLRSPENVIETISSLLASVTLDLSQYAMDIVKGLAGHLKSNSPRLMDEAVLALRNLARQCSDSSAMESLTKHLFAILGGSEGKLTVVAQKMSVLSGIGSVSHHVVSGPSSQVLNGIVAELFIPFLQQEVHEGTLVHAVSVLALWCNRFTMEVPKKLTEWFKKAFSLKTSTSAVRHAYLQCMLASYRGDTLLQALDLLPLLIQTVEKAASQSTQVPTITEGVAAALLLLKLSVADSQAEAKLSSFWQLIVDEKKQVFTSEKFLVMASEDALCTVLHLTERLFLDHPHRLTGNKVQQYHRALVAVLLSRTWHVRRQAQQTVRKLLSSLGGFKLAHGLLEELKTVLSSHKVLPLEALVTDAGEVTEAGKAYVPPRVLQEALCVISGVPGLKGDVTDTEQLAQEMLIISHHPSLVAVQSGLWPALLARMKIDPEAFITRHLDQIIPRMTTQSPLNQSSMNAMGSLSVLSPDRVLPQLISTITASVQNPALRLVTREEFAIMQTPAGELYDKSIIQSAQQDSIKKANMKRENKAYSFKEQIIELELKEEIKKKKGIKEEVQLTSKQKEMLQAQLDREAQVRRRLQELDGELEAALGLLDIILAKNPSGLTQYIPVLVDSFLPLLKSPLAAPRIKNPFLSLAACVMPSRLKALGTLVSHVTLRLLKPECVLDKSWCQEELSVAVKRAVMLLHTHTITSRVGKGEPGAAPLSAPAFSLVFPFLKMVLTEMPHHSEEEEEWMAQILQILTVQAQLRASPNTPPGRVDENGPELLPRVAMLRLLTWVIGTGSPRLQVLASDTLTTLCASSSGDDGCAFAEQEEVDVLLCALQSPCASVRETVLRGLMELHMVLPAPDTDEKNGLNLLRRLWVVKFDKEEEIRKLAERLWSMMGLDLQPDLCSLLIDDVIYHEAAVRQAGAEALSQAVARYQRQAAEVMGRLMEIYQEKLYRPPPVLDALGRVISESPPDQWEARCGLALALNKLSQYLDSSQVKPLFQFFVPDALNDRHPDVRKCMLDAALATLNTHGKENVNSLLPVFEEFLKNAPNDASYDAVRQSVVVLMGSLAKHLDKSDPKVKPIVAKLIAALSTPSQQVQESVASCLPPLVPAIKEDAGGMIQRLMQQLLESDKYAERKGAAYGLAGLVKGLGILSLKQQEMMAALTDAIQDKKNFRRREGALFAFEMLCTMLGKLFEPYVVHVLPHLLLCFGDGNQYVREAADDCAKAVMSNLSAHGVKLVLPSLLAALEEESWRTKAGSVELLGAMAYCAPKQLSSCLPNIVPKLTEVLTDSHVKVQKAGQQALRQIGSVIRNPEILAIAPVLLDALTDPSRKTQKCLQTLLDTKFVHFIDAPSLALIMPIVQRAFQDRSTDTRKMAAQIIGNMYSLTDQKDLAPYLPSVTPGLKASLLDPVPEVRTVSAKALGAMVKGMGESCFEDLLPWLMETLTYEQSSVDRSGAAQGLAEVMAGLGVEKLEKLMPEIVATASKVDIAPHVRDGYIMMFNYLPITFGDKFTPYVGPIIPCILKALADENEFVRDTALRAGQRVISMYAETAIALLLPQLEQGLFDDLWRIRFSSVQLLGDLLFHISGVTGKMTTETASEDDNFGTAQSNKAIITALGVERRNRVLAGLYMGRSDTQLVVRQASLHVWKIVVSNTPRTLREILPTLFGLLLGFLASTCADKRTIAARTLGDLVRKLGEKILPEIIPILEEGLRSQKSDERQGVCIGLSEIMKSTSRDAVLYFSESLVPTARKALCDPLEEVREAAAKTFEQLHSTIGHQALEDILPFLLKQLDDEEVSEFALDGLKQVMAIKSRVVLPYLVPKLTTPPVNTRVLAFLSSVAGDALTRHLGVILPAVMLALKEKLGTPDEQLEMANCQAVILSVEDDTGHRIIIEYLLEATRSPEVGMRQAAAIILNIYCSRSKADYTSHLRSLVSGLIRLFNDSSPVVLEESWDALNAITKKLDAGNQLALIEELHKEIRLIGNESKGEHVPGFCLPKKGVTSILPVLREGVLTGSPEQKEEAAKALGLVIRLTSADALRPSVVSITGPLIRILGDRFSWNVKAALLETLSLLLAKVGIALKPFLPQLQTTFTKALQDSNRGVRLKAADALGKLISIHIKVDPLFTELLNGIRAMEDPGVRDTMLQALRFVIQGAGAKVDAVIRKNIVSLLLSMLGHDEDNTRISSAGCLGELCAFLTEEELSAVLQQCLLADVSGIDWMVRHGRSLALSVAVNVAPGRLCAGRYSSDVQEMILSSATADRIPIAVSGVRGMGFLMRHHIETGGGQLPAKLSSLFVKCLQNPSSDIRLVAEKMIWWANKDPLPPLDPQAIKPILKALLDNTKDKNTVVRAYSDQAIVNLLKMRQGEEVFQSLSKILDVASLEVLNEVNRRSLKKLASQADSTEQVDDTILT

SEQ ID NO: 672 - protein, 2432 aa, Homo sapiens; identical to SEQ ID NO: 668

SEQ ID NO: 673 - protein, 495 aa, Homo sapiens [sequence omitted]

SEQ ID NO: 674 - protein, 495 aa, Homo sapiens
MPMGSLQPLATLYLLGMLVASCLGRLSWYDPDFQARLTRSNSKCQGQLEVYLKDGWHMVCSQSWGRSSKQWEDPSQASKVCQRLNCGVPLSLGPFLVTYTPQSSIICYGQLGSFSNCSHSRNDMCHSLGLTCLEPQKTTPPTTRPPPTTTPEPTAPPRLQLVAQSGGQHCAGVVEFYSGSLGGTISYEAQDKTQDLENFLCNNLQCGSFLKHLPETEAGRAQDPGEPREHQPLPIQWKIQNSSCTSLEHCFRKIKPQKSGRVLALLCSGFQPKVQSRLVGGSSICEGTVEVRQGAQWAALCDSSSARSSLRWEEVCREQQCGSVNSYRVLDAGDPTSRGLFCPHQKLSQCHELWERNSYCKKVFVTCQDPNPAGLAAGTVASIILALVLLVVLLVVCGPLAYKKLVKKFRQKKQRQWIGPTGMNQNMSFHRNHTATVRSHAENPTASHVDNEYSQPPRNSRLSAYPALEGVLHRSSMQPDNSSDSDYDLHGAQRL

SEQ ID NO: 675 - protein, 1960 aa, Homo sapiens
MAQQAADKYLYVDKNFINNPLAQADWAAKKLVWVPSDKSGFEPASLKEEVGEEAIVELVENGKKVKVNKDDIQKMNPPKFSKVEDMAELTCLNEASVLHNLKERYYSGLIYTYSGLFCVVINPYKNLPIYSEEIVEMYKGKKRHEMPPHIYAITDTAYRSMMQDREDQSILCTGESGAGKTENTKKVIQYLAYVASSHKSKKDQGELERQLLQANPILEAFGNAKTVKNDNSSRFGKFIRINFDVNGYIVGANIETYLLEKSRAIRQAKEERTFHIFYYLLSGAGEHLKTDLLLEPYNKYRFLSNGHVTIPGQQDKDMFQETMEAMRIMGIPEEEQMGLLRVISGVLQLGNIVFKKERNTDQASMPDNTAAQKVSHLLGINVTDFTRGILTPRIKVGRDYVQKAQTKEQADFAIEALAKATYERMFRWLVLRINKALDKTKRQGASFIGILDIAGFEIFDLNSFEQLCINYTNEKLQQLFNHTMFILEQEEYQREGIEWNFIDFGLDLQPCIDLIEKPAGPPGILALLDEECWFPKATDKSFVEKVMQEQGTHPKFQKPKQLKDKADFCIIHYAGKVDYKADEWLMKNMDPLNDNIATLLHQSSDKFVSELWKDVDRIIGLDQVAGMSETALPGAFKTRKGMFRTVGQLYKEQLAKLMATLRNTNPNFVRCIIPNHEKKAGKLDPHLVLDQLRCNGVLEGIRICRQGFPNRVVFQEFRQRYEILTPNSIPKGFMDGKQACVLMIKALELDSNLYRIGQSKVFFRAGVLAHLEEERDLKITDVIIGFQACCRGYLARKAFAKRQQQLTAMKVLQRNCAAYLKLRNWQWWRLFTKVKPLLQVSRQEEEMMAKEEELVKVREKQLAAENRLTEMETLQSQLMAEKLQLQEQLQAETELCAEAEELRARLTAKKQELEEICHDLEARVEEEEERCQHLQAEKKKMQQNIQELEEQLEEEESARQKLQLEKVTTEAKLKKLEEEQIILEDQNCKLAKEKKLLEDRIAEFTTNLTEEEEKSKSLAKLKNKHEAMITDLEERLRREEKQRQELEKTRRKLEGDSTDLSDQIAELQAQIAELKMQLAKKEEELQAALARVEEEAAQKNMALKKIRELESQISELQEDLESERASRNKAEKQKRDLGEELEALKTELEDTLDSTAAQQELRSKREQEVNILKKTLEEEAKTHEAQIQEMRQKHSQAVEELAEQLEQTKRVKANLEKAKQTLENERGELANEVKVLLQGKGDSEHKRKKVEAQLQELQVKFNEGERVRTELADKVTKLQVELDNVTGLLSQSDSKSSKLTKDFSALESQLQDTQELLQEENRQKLSLSTKLKQVEDEKNSFREQLEEEEEAKHNLEKQIATLHAQVADMKKKMEDSVGCLETAEEVKRKLQKDLEGLSQRHEEKVAAYDKLEKTKTRLQQELDDLLVDLDHQRQSACNLEKKQKKFDQLLAEEKTISAKYAEERDRAEAEAREKETKALSLARALEEAMEQKAELERLNKQFRTEMEDLMSSKDDVGKSVHELEKSKRALEQQVEEMKTQLEELEDELQATEDAKLRLEVNLQAMKAQFERDLQGRDEQSEEKKKQLVRQVREMEAELEDERKQRSMAVAARKKLEMDLKDLEAHIDSANKNRDEAIKQLRKLQAQMKDCMRELDDTRASREEILAQAKENEKKLKSMEAEMIQLQEELAAAERAKRQAQQERDELADEIANSSGKGALALEEKRRLEARIAQLEEELEEEQGNTELINDRLKKANLQIDQINTDLNLERSHAQKNENARQQLERQNKELKVKLQEMEGTVKSKYKASITALEAKIAQLEEQLDNETKERQAACKQVRRTEKKLKDVLLQVDDERRNAEQYKDQADKASTRLKQLKRQLEEAEEEAQRANASRRKLQRELEDATETADAMNREVSSLKNKLRRGDLPFVVPRRMARKGAGDGSDEEVDGKADGAEAKPAE

SEQ ID NO: 676 - protein, 1960 aa, Homo sapiens; identical to SEQ ID NO: 675

SEQ ID NO: 677 - protein, 1960 aa, Homo sapiens; identical to SEQ ID NO: 675

SEQ ID NO: 678 - protein, 1960 aa, Homo sapiens; identical to SEQ ID NO: 675

SEQ ID NO: 679 - protein, 267 aa, Homo sapiens
MTLGRRLACLFLACVLPALLLGGTALASEIVGGRRARPHAWPFMVSLQLRGGHFCGATLIAPNFVMSAAHCVANVNVRAVRVVLGAHNLSRREPTRQVFAVQRIFENGYDPVNLLNDIVILQLNGSATINANVQVAQLPAQGRRLGNGVQCLAMGWGLLGRNRGIASVLQELNVTVVTSLCRRSNVCTLVRGRQAGVCFGDSGSPLVCNGLIHGIASFVRGGCASGLYPDAFAPVAQFVNWIDSIIQRSEDNPCPHPRDPDPASRTH

SEQ ID NO: 680 - protein, 267 aa, Homo sapiens; identical to SEQ ID NO: 679

SEQ ID NO: 681 - protein, 535 aa, Homo sapiens
MASLSLAPVNIFKAGADEERAETARLTSFIGAIAIGDLVKSTLGPKGMDKILLSSGRDASLMVTNDGATILKNIGVDNPAAKVLVDMSRVQDDEVGDGTTSVTVLAAELLREAESLIAKKIHPQTIIAGWREATKAAREALLSSAVDHGSDEVKFRQDLMNIAGTTLSSKLLTHHKDHFTKLAVEAVLRLKGSGNLEAIHIIKKLGGSLADSYLDEGFLLDKKIGVNQPKRIENAKILIANTGMDTDKIKIFGSRVRVDSTAKVAEIEHAEKEKMKEKVERILKHGINCFINRQLIYNYPEQLFGAAGVMAIEHADFAGVERLALVTGGEIASTFDHPELVKLGSCKLIEEVMIGEDKLIHFSGVALGEACTIVLRGATQQILDEAERSLHDALCVLAQTVKDSRTVYGGGCSEMLMAHAVTQLANRTPGKEAVAMESYAKALRMLPTIIADNAGYDSADLVAQLRAAHSEGNTTAGLDMREGTIGDMAILGITESFQVKRQVLLSAAEAAEVILRVDNIIKAAPRKRVPDHHPC

SEQ ID NO: 682 - protein, 535 aa, Homo sapiens; identical to SEQ ID NO: 681

SEQ ID NO: 683 - protein, 488 aa, Homo sapiens
MDKILLSSGRDASLMVTNDGATILKNIGVDNPAAKVLVDMSRVQDDEVGDGTTSVTVLAAELLREAESLIAKKIHPQTIIAGWREATKAAREALLSSAVDHGSDEVKFRQDLMNIAGTTLSSKLLTHHKDHFTKLAVEAVLRLKGSGNLEAIHIIKKLGGSLADSYLDEGFLLDKKIGVNQPKRIENAKILIANTGMDTDKIKIFGSRVRVDSTAKVAEIEHAEKEKMKEKVERILKHGINCFINRQLIYNYPEQLFGAAGVMAIEHADFAGVERLALVTGGEIASTFDHPELVKLGSCKLIEEVMIGEDKLIHFSGVALGEACTIVLRGATQQILDEAERSLHDALCVLAQTVKDSRTVYGGGCSEMLMAHAVTQLANRTPGKEAVAMESYAKALRMLPTIIADNAGYDSADLVAQLRAAHSEGNTTAGLDMREGTIGDMAILGITESFQVKRQVLLSAAEAAEVILRVDNIIKAAPRKRVPDHHPC

SEQ ID NO: 684 - DNA, 1822 bp, Homo sapiens
agcccggtactcttccggccggcaggccgccgcaccgccgcggccgcgccccaccggctgctcgtggccgagccgcccctggcccctgacccttgacctgactcccagcccgggccccgcgccccaagcggcgaccccgcccgcgcagtccccggaagcgcgcccgcaatggctgccatccggaagaaactggtgattgttggtgatggagcctgtggaaagacatgcttgctcatagtcttcagcaaggaccagttcccagaggtgtatgtgcccacagtgtttgagaactatgtggcagatatcgaggtggatggaaagcaggtagagttggctttgtgggacacagctgggcaggaagattatgatcgcctgaggcccctctcctacccagataccgatgttatactgatgtgtttttccatcgacagccctgatagtttagaaaacatcccagaaaagtggaccccagaagtcaagcatttctgtcccaacgtgcccatcatcctggttgggaataagaaggatcttcggaatgatgagcacacaaggcgggagctagccaagatgaagcaggagccggtgaaacctgaagaaggcagagatatggcaaacaggattggcgcttttgggtacatggagtgttcagcaaagaccaaagatggagtgagagaggtttttgaaatggctacgagagctgctctgcaagctagacgtgggaagaaaaaatctgggtgccttgtcttgtgaaaccttgctgcaagcacagcccttatgcggttaattttgaagtgctgtttattaatcttagtgtatgattactggcctttttcatttatctataatttacctaagattacaaatcagaagtcatcttgctaccagtatttagaagccaactatgattattaacgatgtccaacccgtctggcccaccagggtccttttgacactgctctaacagccctcctctgcactcccacctgacacaccaggcgctaattcaaggaatttcttaacttcttgcttctttctagaaagagaaacagttggtaacttttgtgaattaggctgtaactactttataactaacatgtcctgcctattatctgtcagctgcaaggtactctggtgagtcaccacttcagggctttactccgtaacagattttgttggcatagctctggggtgggcagttttttgaaaatgggctcaaccagaaaagcccaagttcatgcagctgtggcagagttacagttctgtggtttcatgttagttaccttatagttactgtgtaattagtgccacttaatgtatgttaccaaaaataaatatatctaccccagactagatgtagtattttttgtataattggatttcctaatactgtcatcctcaaagaaagtgtattggttttttaaaaaagaaagtgtatttggaaataaagtcagatggaaaattcattttttaaattcccgttttgtcactttttctgataaaagatggccatattaccccttttcggccccatgtatctcagtaccccatggagctgggctaagtaaataggaattggtttcacgcctgaggcaattagacactttggaagatggcataacctgtctcacctggacttaagcgtctggctctaattcacagtgctcttttctcctcactgtatccaggttccctcccagaggagccaccagttctcatgggtggcactcagtctctcttctctccagctgactaaactttttttctgtaccagttaatttttccaactactaatagaataaaggcagttttctaaacttcctgt

SEQ ID NO: 685 - DNA, 1927 bp, Homo sapiens
gatgagctgtgagtgcgcgcgcgtgcgcggggccgcgacctgtgccggctcgagcccgctgggcactcggaggcgcgcacgtcgttccccgccctcccgccgccgcccgccctcgctctctcgcgctaccctcccgccgcccgcggtcctccgtcggttctctcgttagtccacggtctggtcttcagctacccgccttcgtctccgagtttgcgactcgcggaccggcgtccccggcgcgaagaggctggactcggattcgttgcctgagcaatggctgccatccggaagaaactggtgattgttggtgatggagcctgtggaaagacatgcttgctcatagtcttcagcaaggaccagttcccagaggtgtatgtgcccacagtgtttgagaactatgtggcagatatcgaggtggatggaaagcaggtagagttggctttgtgggacacagctgggcaggaagattatgatcgcctgaggcccctctcctacccagataccgatgttatactgatgtgtttttccatcgacagccctgatagtttagaaaacatcccagaaaagtggaccccagaagtcaagcatttctgtcccaacgtgcccatcatcctggttgggaataagaaggatcttcggaatgatgagcacacaaggcgggagctagccaagatgaagcaggagccggtgaaacctgaagaaggcagagatatggcaaacaggattggcgcttttgggtacatggagtgttcagcaaagaccaaagatggagtgagagaggtttttgaaatggctacgagagctgctctgcaagctagacgtgggaagaaaaaatctgggtgccttgtcttgtgaaaccttgctgcaagcacagcccttatgcggttaattttgaagtgctgtttattaatcttagtgtatgattactggcctttttcatttatctataatttacctaagattacaaatcagaagtcatcttgctaccagtatttagaagccaactatgattattaacgatgtccaacccgtctggcccaccagggtccttttgacactgctctaacagccctcctctgcactcccacctgacacaccaggcgctaattcaaggaatttcttaacttcttgcttctttctagaaagagaaacagttggtaacttttgtgaattaggctgtaactactttataactaacatgtcctgcctattatctgtcagctgcaaggtactctggtgagtcaccacttcagggctttactccgtaacagattttgttggcatagctctggggtgggcagttttttgaaaatgggctcaaccagaaaagcccaagttcatgcagctgtggcagagttacagttctgtggtttcatgttagttaccttatagttactgtgtaattagtgccacttaatgtatgttaccaaaaataaatatatctaccccagactagatgtagtattttttgtataattggatttcctaatactgtcatcctcaaagaaagtgtattggttttttaaaaaagaaagtgtatttggaaataaagtcagatggaaaattcattttttaaattcccgttttgtcactttttctgataaaagatggccatattaccccttttcggccccatgtatctcagtaccccatggagctgggctaagtaaataggaattggtttcacgcctgaggcaattagacactttggaagatggcataacctgtctcacctggacttaagcgtctggctctaattcacagtgctcttttctcctcactgtatccaggttccctcccagaggagccaccagttctcatgggtggcactcagtctctcttctctccagctgactaaactttttttctgtaccagttaatttttccaactactaatagaataaaggcagttttctaaacttcctgt

SEQ ID NO: 686 - DNA, 1944 bp, Homo sapiens
tgtgcctccctgcaccccatggccctgagaactctcacacccccaccacaggcacagaaagcaccttactgggaaggccgctgtgtggactatggagtgcggggctgagccggtgggaggttgcagcagggaggctgcagcactgggctggtccagtgctcccactgtggccccagctgaggcaggaagtagagactgaggtgggggaaggaaacagcaaaggcccctgaaaggcagtccggcttagtgcctaaacgcatgtggctgtggagctggaagccggggatgcatcctggtctgagtgctttgctaattgtgtgaccggagcagttccctcccttaacctctctgtgcatcaatagttcctgccttaagggctgttgtgaggagtaaatgagttaatatttgctaatattagaataacgtgtggcacatggtaaactctgtttaagggtctgctgtagtcaacgtcatctgtgtgccaccgtgtgctgtgagcataatgccccctggctctctgttctgatcatccccaactccagggcttcctgaaaccagagctgctaggcagtgaattcacccaccttgagttcccccgcagagttctgcccaaggagctggggcagaggatgttgtaccgggaccagaacatgaccggctggctcgggtgatggccaccattggggtgacccgaggcttgggagaccacagccttaaggtctgcagttccaccctgcccatcaagccctttctctcctgcttccctgaggtacgagtgtatgacctgacacaatatgagcactgcccagatgatgtgctagtcctgggaacagatggcctgtgggatgtcactactgactgtgaggtagctgccactgtggacagggtgctgtcggcctatgagcctaatgaccacagcagccccaccatggctgcaatccgaaagaagctggtgatcgttggggatggtgcctgtgggaagacctgcctcctcatcgtcttcagcaaggatcagtttccggaggtctacgtccctactgtctttgagaactatattgcggacattgaggtggacggcaagcaggtggagctggctctgtgggacacagcagggcaggaagactatgatcgactgcggcctctctcctacccggacactgatgtcatcctcatgtgcttctccatcgacagccctgacagcctggaaaacattcctgagaagtggaccccagaggtgaagcacttctgccccaacgtgcccatcatcctggtggggaataagaaggacctgaggcaagacgagcacaccaggagagagctggccaagatgaagcaggagcccgttcggtctgaggaaggccgggacatggcgaaccggatcagtgcctttggctaccttgagtgctcagccaagaccaaggagggagtgcgggaggtgtttgagatggccactcgggctggcctccaggtccgcaagaacaagcgtcggaggggctgtcccattctctgagatccccaaggcctttcctacatgccccctcccttcacaggggtacagaaattatccccctacaaccccagcctcctgagggctccatgctgaaggctcccattttcagttccctcctgcccaggactgcattgttttctagccccgaggtggtggcacgggccctccctcccagcgctctgggagccacgcctatgccctgcccttcctcagggcccctggggatcttgccccctttgaccttccccaaaggatggtcacacaccagcactttatacacttctggctcacaggaaagtgtctgcagtaggggacccagagtcccaggcccctggagttgttttcggcaggggccttgtctctcactgcatttggtcaggggggcatgaataaaggctacaggctccaacgtgtgtggcagctttcggtctttc

SEQ ID NO: 687 - DNA, 582 bp, Homo sapiens
atggctgccatccggaagaaactggtgattgttggtgatggagcctgtggaaagacatgcttgctcatagtcttcagcaaggaccagttcccagaggtgtatgtgcccacagtgtttgagaactatgtggcagatatcgaggtggatggaaagcaggtagagttggctttgtgggacacagctgggcaggaagattatgatcgcctgaggcccctctcctacccagataccgatgttatactgatgtgtttttccatcgacagccctgatagtttagaaaacatcccagaaaagtggaccccagaagtcaagcatttctgtcccaacgtgcccatcatcctggttgggaataagaaggatcttcggaatgatgagcacacaaggcgggagctagccaagatgaagcaggagccggtgaaacctgaagaaggcagagatatggcaaacaggattggcgcttttgggtacatggagtgttcagcaaagaccaaagatggagtgagagaggtttttgaaatggctacgagagctgctctgcaagctagacgtgggaagaaaaaatctggttgccttgtcttgtga

SEQ ID NO: 688 - DNA, 1667 bp, Homo sapiens
ttcagctacccgccttcgtctccgagtttgcgactcgcggaccggcgtccccggcgcgaagaggctggactcggattcgttgcagcaatggctgccatccggaagaaactggtgattgttggtgatggagcctgtggaaagacatgcttgctcatagtcttcagcaaggaccagttcccagaggtgtatgtgcccacagtgtttgagaactatgtggcagatatcgaggtggatggaaagcaggtagagttggctttgtgggacacagctgggcaggaagattatgatcgcctgaggcccctctcctacccagataccgatgttatactgatgtgtttttccatcgacagccctgatagtttagaaaacatcccagaaaagtggaccccagaagtcaagcatttctgtcccaacgtgcccatcatcctggttgggaataagaaggatcttcggaatgatgagcacacaaggcgggagctagccaagatgaagcaggagccggtgaaacctgaagaaggcagagatatggcaaacaggattggcgcttttgggtacatggagtgttcagcaaagaccaaagatggagtgagagaggtttttgaaatggctacgagagctgctctgcaagctagacgtgggaagaaaaaatctgggtgccttgtcttgtgaaaccttgctgcaagcacagcccttatgcggttaattttgaagtgctgtttattaatcttagtgtatgattactggcctttttcatttatctataatttacctaagattacaaatcagaagtcatcttgctaccagtatttagaagccaactatgattattaacgatgtccaacccgtctggcccaccagggtccttttgacactgctctaacagccctcctctgcactcccacctgacacaccaggcgctaattcaaggaatttcttaacttcttgcttctttctagaaagagaaacagttggtaacttttgtgaattaggctgtaactactttataactaacatgtcctgcctattatctgtcagctgcaaggtactctggtgagtcaccacttcagggctttactccgtaacagattttcagctgtggcagagttacagttctgtggtttcatgttagttaccttatagttactgtgtaattagtgccacttaatgtatgttaccaaaaataaatatatctaccccagactagatgtagtattttttgtataattggatttcctaatactgtcatcctcaaagaaagtgtattggttttttaaaaaagaaagtgtatttggaaataaagtcagatggaaaattcattttttaaattcccgttttgtcactttttctgataaaagatggccatattaccccttttcggccccatgtatctcagtaccccatggagctgggctaagtaaataggaattggtttcacgcctgaggcaattagacactttggaagatggcataacctgtctcacctggacttaagcgtctggctctaattcacagtgctcttttctcctcactgtatccaggttccctcccagaggagccaccagttctcatgggtggcactcagtctctcttctctccagctgactaaactttttttctgtaccagttaatttttccaactactaatagaataaaggcagttttctaaa

SEQ ID NO: 689 - DNA, 582 bp, Homo sapiens
atggctgcaatccgaaagaagctggtgatcgttggggatggtgcctgtgggaagacctgcctcctcatcgtcttcagcaaggatcagtttccggaggtctacgtccctactgtctttgagaactatattgcggacattgaggtggacggcaagcaggtggagctggctctgtgggacacagcagggcaggaagactatgatcgactgcggcctctctcctacccggacactgatgtcatcctcatgtgcttctccatcgacagccctgacagcctggaaaacattcctgagaagtggaccccagaggtgaagcacttctgccccaacgtgcccatcatcctggtggggaataagaaggacctgaggcaagacgagcacaccaggagagagctggccaagatgaagcaggagcccgttcggtctgaggaaggccgggacatggcgaaccggatcagtgcctttggctaccttgagtgctcagccaagaccaaggagggagtgcgggaggtgtttgagatggccactcgggctggcctccaggtccgcaagaacaagcgtcggaggggctgtcccattctctga

SEQ ID NO: 690 - DNA, 1260 bp, Homo sapiens
ccggcaccggccgcgcagctggaggcggcggagcggaagggcaaggtgaactaatggagtgggtggaggagttggaagaaatcccagcgtcagtcaccgggatagaattcccaaggaaccctctttttggaggatggtttccatttctggaggcgatctgccgacaggccttgacttcatctcagctccagagcccgccctctcttcctgcagcctgggaacttcagccggctggagccccaccatggctgcaatccgaaagaagctggtgatcgttggggatggtgcctgtgggaagacctgcctcctcatcgtcttcagcaaggatcagtttccggaggtctacgtccctactgtctttgagaactatattgcggacattgaggtggacggcaagcaggtggagctggctctgtgggacacagcagggcaggaagactatgatcgactgcggcctctctcctacccggacactgatgtcatcctcatgtgcttctccatcgacagccctgacagcctggaaaacattcctgagaagtggaccccagaggtgaagcacttctgccccaacgtgcccatcatcctggtggggaataagaaggacctgaggcaagacgagcacaccaggagagagctggccaagatgaagcaggagcccgttcggtctgaggaaggccgggacatggcgaaccggatcagtgcctttggctaccttgagtgctcagccaagaccaaggagggagtgcgggaggtgtttgagatggccactcgggctggcctccaggtccgcaagaacaagcgtcggaggggctgtcccattctctgagatccccaaggcctttcctacatgccccctcccttcacaggggtacagaaattatccccctacaaccccagcctcctgagggctccatgctgaaggctcccattttcagttccctcctgcccaggactgcattgttttctagccccgaggtggtggcacgggccctccctcccagcgctctgggagccacgcctatgccctgcccttcctcagggcccctggggatcttgccccctttgaccttccccaaaggatggtcacacaccagcactttatacacttctggctcacaggaaagtgtctgcagtaggggacccagagtcccaggcccctggagttgttttcggcaggggccttgtctctcactgcatttggtcaggggggcatgaataaaggctacaggctccaacgtgtgtggcagctttcggtctttc

SEQ ID NO: 691 - DNA, 3235 bp, Homo sapiens
cggctcgggccacgcccacctgtcctgcagcactggatgctttgtgagttggggattgttgcgtcccatatctggacccagaagggacttccctgctcggctggctctcggtttctctgctttcctccggagaaataacagcgtcttccgcgccgcgcatggagcctcccggccgccgcgagtgtccctttccttcctggcgctttcctgggttgcttctggcggccatggtgttgctgctgtactccttctccgatgcctgtgaggagccaccaacatttgaagctatggagctcattggtaaaccaaaaccctactatgagattggtgaacgagtagattataagtgtaaaaaaggatacttctatatacctcctcttgccacccatactatttgtgatcggaatcatacatggctacctgtctcagatgacgcctgttatagagaaacatgtccatatatacgggatcctttaaatggccaagcagtccctgcaaatgggacttacgagtttggttatcagatgcactttatttgtaatgagggttattacttaattggtgaagaaattctatattgtgaacttaaaggatcagtagcaatttggagcggtaagcccccaatatgtgaaaaggttttgtgtacaccacctccaaaaataaaaaatggaaaacacacctttagtgaagtagaagtatttgagtatcttgatgcagtaacttatagttgtgatcctgcacctggaccagatccattttcacttattggagagagcacgatttattgtggtgacaattcagtgtggagtcgtgctgctccagagtgtaaagtggtcaaatgtcgatttccagtagtcgaaaatggaaaacagatatcaggatttggaaaaaaattttactacaaagcaacagttatgtttgaatgcgataagggtttttacctcgatggcagcgacacaattgtctgtgacagtaacagtacttgggatcccccagttccaaagtgtcttaaagtgtcgacttcttccactacaaaatctccagcgtccagtgcctcaggtcctaggcctacttacaagcctccagtctcaaattatccaggatatcctaaacctgaggaaggaatacttgacagtttggatgtttgggtcattgctgtgattgttattgccatagttgttggagttgcagtaatttgtgttgtcccgtacagatatcttcaaaggaggaagaagaaagggaaagcagatggtggagctgaatatgccacttaccagactaaatcaaccactccagcagagcagagaggctgaatagattccacaacctggtttgccagttcatcttttgactctattaaaatcttcaatagttgttattctgtagtttcactctcatgagtgcaactgtggcttagctaatattgcaatgtggcttgaatgtaggtagcatcctttgatgcttctttgaaacttgtatgaatttgggtatgaacagattgcctgctttcccttaaataacacttagatttattggaccagtcagcacagcatgcctggttgtattaaagcagggatatgctgtattttataaaattggcaaaattagagaaatatagttcacaatgaaattatattttctttgtaaagaaagtggcttgaaatcttttttgttcaaagattaatgccaactcttaagattattctttcaccaactatagaatgtattttatatatcgttcattgtaaaaagcccttaaaaatatgtgtatactactttggctcttgtgcataaaaacaagaacactgaaaattgggaatatgcacaaacttggcttctttaaccaagaatattattggaaaattctctaaaagttaatagggtaaattctctattttttgtaatgtgttcggtgatttcagaaagctagaaagtgtatgtgtggcatttgttttcactttttaaaacatccctaactgatcgaatatatcagtaatttcagaatcagatgcatcctttcataagaagtgagaggactctgacagccataacaggagtgccacttcatggtgcgaagtgaacactgtagtcttgttgttttcccaaagagaactccgtatgttctcttaggttgagtaacccactctgaattctggttacatgtgtttttctctccctccttaaataaagagaggggttaaacatgccctctaaaagtaggtggttttgaagagaataaattcatcagataacctcaagtcacatgagaatcttagtccatttacattgccttggctagtaaaagccatctatgtatatgtcttacctcatctcctaaaaggcagagtacaaagtaagccatgtatctcaggaaggtaacttcattttgtctatttgctgttgattgtaccaagggatggaagaagtaaatatagctcaggtagcactttatactcaggcagatctcagccctctactgagtcccttagccaagcagtttctttcaaagaagccagcaggcgaaaagcagggactgccactgcatttcatatcacactgttaaaagttgtgttttgaaattttatgtttagttgcacaaattgggccaaagaaacattgccttgaggaagatatgattggaaaatcaagagtgtagaagaataaatactgttttactgtccaaagacatgtttatagtgctctgtaaatgttcctttcctttgtagtctctggcaagatgctttaggaagataaaagtttgaggagaacaaacaggaattctgaattaagcacagagttgaagtttatacccgtttcacatgcttttcaagaatgtcgcaattactaagaagcagataatggtgttttttagaaacctaattgaagtatattcaaccaaatactttaatgtataaaataaatattatacaatatacttgtatagcagtttctgcttcacatttgattttttcaaatttaatatttatattagagatctatatatgtataaatatgtattttgtcaaatttgttacttaaatatatagagaccagttttctctggaagtttgtttaaatgacagaagcgtatatgaattcaagaaaatttaagctgcaaaaatgtatttgctataaaatgagaagtctcactgatagaggttctttattgctcattttttaaaaaatggactcttgaaatctgttaaaataaaattgtacatttggagatgtttca

SEQ ID NO: 692 - DNA, 3371 bp, Homo sapiens
gctcgggccacgcccacctgtcctgcagcactggatgctttgtgagttggggattgttgcgtcccatatctggacccagaagggacttccctgctcggctggctctcggtttctctgctttcctccggagaaataacagcgtcttccgcgccgcgcatggagcctcccggccgccgcgagtgtccctttccttcctggcgctttcctgggttgcttctggcggccatggtgttgctgctgtactccttctccgatgcctgtgaggagccaccaacatttgaagctatggagctcattggtaaaccaaaaccctactatgagattggtgaacgagtagattataagtgtaaaaaaggatacttctatatacctcctcttgccacccatactatttgtgatcggaatcatacatggctacctgtctcagatgacgcctgttatagagaaacatgtccatatatacgggatcctttaaatggccaagcagtccctgcaaatgggacttacgagtttggttatcagatgcactttatttgtaatgagggttattacttaattggtgaagaaattctatattgtgaacttaaaggatcagtagcaatttggagcggtaagcccccaatatgtgaaaaggttttgtgtacaccacctccaaaaataaaaaatggaaaacacacctttagtgaagtagaagtatttgagtatcttgatgcagtaacttatagttgtgatcctgcacctggaccagatccattttcacttattggagagagcacgatttattgtggtgacaattcagtgtggagtcgtgctgctccagagtgtaaagtggtcaaatgtcgatttccagtagtcgaaaatggaaaacagatatcaggatttggaaaaaaattttactacaaagcaacagttatgtttgaatgcgataagggtttttacctcgatggcagcgacacaattgtctgtgacagtaacagtacttgggatcccccagttccaaagtgtcttaaagtgctgcctccatctagtacaaaacctccagctttgagtcattcagtgtcgacttcttccactacaaaatctccagcgtccagtgcctcaggtcctaggcctacttacaagcctccagtctcaaattatccaggatatcctaaacctgaggaaggaatacttgacagtttggatgtttgggtcattgctgtgattgttattgccatagttgttggagttgcagtaatttgtgttgtcccgtacagatatcttcaaaggaggaagaagaaaggcacatacctaactgatgagacccacagagaagtaaaatttacttctctctgagaaggagagatgagagaaaggtttgcttttatcattaaaaggaaagcagatggtggagctgaatatgccacttaccagactaaatcaaccactccagcagagcagagaggctgaatagattccacaacctggtttgccagttcatcttttgactctattaaaatcttcaatagttgttattctgtagtttcactctcatgagtgcaactgtggcttagctaatattgcaatgtggcttgaatgtaggtagcatcctttgatgcttctttgaaacttgtatgaatttgggtatgaacagattgcctgctttcccttaaataacacttagatttattggaccagtcagcacagcatgcctggttgtattaaagcagggatatgctgtattttataaaattggcaaaattagagaaatatagttcacaatgaaattatattttctttgtaaagaaagtggcttgaaatcttttttgttcaaagattaatgccaactcttaagattattctttcaccaactatagaatgtattttatatatcgttcattgtaaaaagcccttaaaaatatgtgtatactactttggctcttgtgcataaaaacaagaacactgaaaattgggaatatgcacaaacttggcttctttaaccaagaatattattggaaaattctctaaaagttaatagggtaaattctctattttttgtaatgtgttcggtgatttcagaaagctagaaagtgtatgtgtggcatttgttttcactttttaaaacatccctaactgatcgaatatatcagtaatttcagaatcagatgcatcctttcataagaagtgagaggactctgacagccataacaggagtgccacttcatggtgcgaagtgaacactgtagtcttgttgttttcccaaagagaactccgtatgttctcttaggttgagtaacccactctgaattctggttacatgtgtttttctctccctccttaaataaagagaggggttaaacatgccctctaaaagtaggtggttttgaagagaataaattcatcagataacctcaagtcacatgagaatcttagtccatttacattgccttggctagtaaaagccatctatgtatatgtcttacctcatctcctaaaaggcagagtacaaagtaagccatgtatctcaggaaggtaacttcattttgtctatttgctgttgattgtaccaagggatggaagaagtaaatatagctcaggtagcactttatactcaggcagatctcagccctctactgagtcccttagccaagcagtttctttcaaagaagccagcaggcgaaaagcagggactgccactgcatttcatatcacactgttaaaagttgtgttttgaaattttatgtttagttgcacaaattgggccaaagaaacattgccttgaggaagatatgattggaaaatcaagagtgtagaagaataaatactgttttactgtccaaagacatgtttatagtgctctgtaaatgttcctttcctttgtagtctctggcaagatgctttaggaagataaaagtttgaggagaacaaacaggaattctgaattaagcacagagttgaagtttatacccgtttcacatgcttttcaagaatgtcgcaattactaagaagcagataatggtgttttttagaaacctaattgaagtatattcaaccaaatactttaatgtataaaataaatattatacaatatacttgtatagcagtttctgcttcacatttgattttttcaaatttaatatttatattagagatctatatatgtataaatatgtattttgtcaaatttgttacttaaatatatagagaccagttttctctggaagtttgtttaaatgacagaagcgtatatgaattcaagaaaatttaagctgcaaaaatgtatttgctataaaatgagaagtctcactgatagaggttctttattgctcattttttaaaaaatggactcttgaaatctgttaaaataaaattgtacatttggagatgtttca

SEQ ID NO: 693 - DNA, 3278 bp, Homo sapiens
gctcgggccacgcccacctgtcctgcagcactggatgctttgtgagttggggattgttgcgtcccatatctggacccagaagggacttccctgctcggctggctctcggtttctctgctttcctccggagaaataacagcgtcttccgcgccgcgcatggagcctcccggccgccgcgagtgtccctttccttcctggcgctttcctgggttgcttctggcggccatggtgttgctgctgtactccttctccgatgcctgtgaggagccaccaacatttgaagctatggagctcattggtaaaccaaaaccctactatgagattggtgaacgagtagattataagtgtaaaaaaggatacttctatatacctcctcttgccacccatactatttgtgatcggaatcatacatggctacctgtctcagatgacgcctgttatagagaaacatgtccatatatacgggatcctttaaatggccaagcagtccctgcaaatgggacttacgagtttggttatcagatgcactttatttgtaatgagggttattacttaattggtgaagaaattctatattgtgaacttaaaggatcagtagcaatttggagcggtaagcccccaatatgtgaaaaggttttgtgtacaccacctccaaaaataaaaaatggaaaacacacctttagtgaagtagaagtatttgagtatcttgatgcagtaacttatagttgtgatcctgcacctggaccagatccattttcacttattggagagagcacgatttattgtggtgacaattcagtgtggagtcgtgctgctccagagtgtaaagtggtcaaatgtcgatttccagtagtcgaaaatggaaaacagatatcaggatttggaaaaaaattttactacaaagcaacagttatgtttgaatgcgataagggtttttacctcgatggcagcgacacaattgtctgtgacagtaacagtacttgggatcccccagttccaaagtgtcttaaagtgctgcctccatctagtacaaaacctccagctttgagtcattcagtgtcgacttcttccactacaaaatctccagcgtccagtgcctcaggtcctaggcctacttacaagcctccagtctcaaattatccaggatatcctaaacctgaggaaggaatacttgacagtttggatgtttgggtcattgctgtgattgttattgccatagttgttggagttgcagtaatttgtgttgtcccgtacagatatcttcaaaggaggaagaagaaagggaaagcagatggtggagctgaatatgccacttaccagactaaatcaaccactccagcagagcagagaggctgaatagattccacaacctggtttgccagttcatcttttgactctattaaaatcttcaatagttgttattctgtagtttcactctcatgagtgcaactgtggcttagctaatattgcaatgtggcttgaatgtaggtagcatcctttgatgcttctttgaaacttgtatgaatttgggtatgaacagattgcctgctttcccttaaataacacttagatttattggaccagtcagcacagcatgcctggttgtattaaagcagggatatgctgtattttataaaattggcaaaattagagaaatatagttcacaatgaaattatattttctttgtaaagaaagtggcttgaaatcttttttgttcaaagattaatgccaactcttaagattattctttcaccaactatagaatgtattttatatatcgttcattgtaaaaagcccttaaaaatatgtgtatactactttggctcttgtgcataaaaacaagaacactgaaaattgggaatatgcacaaacttggcttctttaaccaagaatattattggaaaattctctaaaagttaatagggtaaattctctattttttgtaatgtgttcggtgatttcagaaagctagaaagtgtatgtgtggcatttgttttcactttttaaaacatccctaactgatcgaatatatcagtaatttcagaatcagatgcatcctttcataagaagtgagaggactctgacagccataacaggagtgccacttcatggtgcgaagtgaacactgtagtcttgttgttttcccaaagagaactccgtatgttctcttaggttgagtaacccactctgaattctggttacatgtgtttttctctccctccttaaataaagagaggggttaaacatgccctctaaaagtaggtggttttgaagagaataaattcatcagataacctcaagtcacatgagaatcttagtccatttacattgccttggctagtaaaagccatctatgtatatgtcttacctcatctcctaaaaggcagagtacaaagtaagccatgtatctcaggaaggtaacttcattttgtctatttgctgttgattgtaccaagggatggaagaagtaaatatagctcaggtagcactttatactcaggcagatctcagccctctactgagtcccttagccaagcagtttctttcaaagaagccagcaggcgaaaagcagggactgccactgcatttcatatcacactgttaaaagttgtgttttgaaattttatgtttagttgcacaaattgggccaaagaaacattgccttgaggaagatatgattggaaaatcaagagtgtagaagaataaatactgttttactgtccaaagacatgtttatagtgctctgtaaatgttcctttcctttgtagtctctggcaagatgctttaggaagataaaagtttgaggagaacaaacaggaattctgaattaagcacagagttgaagtttatacccgtttcacatgcttttcaagaatgtcgcaattactaagaagcagataatggtgttttttagaaacctaattgaagtatattcaaccaaatactttaatgtataaaataaatattatacaatatacttgtatagcagtttctgcttcacatttgattttttcaaatttaatatttatattagagatctatatatgtataaatatgtattttgtcaaatttgttacttaaatatatagagaccagttttctctggaagtttgtttaaatgacagaagcgtatatgaattcaagaaaatttaagctgcaaaaatgtatttgctataaaatgagaagtctcactgatagaggttctttattgctcattttttaaaaaatggactcttgaaatctgttaaaataaaattgtacatttggagatgtttca

SEQ ID NO: 694 - DNA, 3281 bp, Homo sapiens
gctcgggccacgcccacctgtcctgcagcactggatgctttgtgagttggggattgttgcgtcccatatctggacccagaagggacttccctgctcggctggctctcggtttctctgctttcctccggagaaataacagcgtcttccgcgccgcgcatggagcctcccggccgccgcgagtgtccctttccttcctggcgctttcctgggttgcttctggcggccatggtgttgctgctgtactccttctccgatgcctgtgaggagccaccaacatttgaagctatggagctcattggtaaaccaaaaccctactatgagattggtgaacgagtagattataagtgtaaaaaaggatacttctatatacctcctcttgccacccatactatttgtgatcggaatcatacatggctacctgtctcagatgacgcctgttatagagaaacatgtccatatatacgggatcctttaaatggccaagcagtccctgcaaatgggacttacgagtttggttatcagatgcactttatttgtaatgagggttattacttaattggtgaagaaattctatattgtgaacttaaaggatcagtagcaatttggagcggtaagcccccaatatgtgaaaaggttttgtgtacaccacctccaaaaataaaaaatggaaaacacacctttagtgaagtagaagtatttgagtatcttgatgcagtaacttatagttgtgatcctgcacctggaccagatccattttcacttattggagagagcacgatttattgtggtgacaattcagtgtggagtcgtgctgctccagagtgtaaagtggtcaaatgtcgatttccagtagtcgaaaatggaaaacagatatcaggatttggaaaaaaattttactacaaagcaacagttatgtttgaatgcgataagggtttttacctcgatggcagcgacacaattgtctgtgacagtaacagtacttgggatcccccagttccaaagtgtcttaaaggtcctaggcctacttacaagcctccagtctcaaattatccaggatatcctaaacctgaggaaggaatacttgacagtttggatgtttgggtcattgctgtgattgttattgccatagttgttggagttgcagtaatttgtgttgtcccgtacagatatcttcaaaggaggaagaagaaaggcacatacctaactgatgagacccacagagaagtaaaatttacttctctctgagaaggagagatgagagaaaggtttgcttttatcattaaaaggaaagcagatggtggagctgaatatgccacttaccagactaaatcaaccactccagcagagcagagaggctgaatagattccacaacctggtttgccagttcatcttttgactctattaaaatcttcaatagttgttattctgtagtttcactctcatgagtgcaactgtggcttagctaatattgcaatgtggcttgaatgtaggtagcatcctttgatgcttctttgaaacttgtatgaatttgggtatgaacagattgcctgctttcccttaaataacacttagatttattggaccagtcagcacagcatgcctggttgtattaaagcagggatatgctgtattttataaaattggcaaaattagagaaatatagttcacaatgaaattatattttctttgtaaagaaagtggcttgaaatcttttttgttcaaagattaatgccaactcttaagattattctttcaccaactatagaatgtattttatatatcgttcattgtaaaaagcccttaaaaatatgtgtatactactttggctcttgtgcataaaaacaagaacactgaaaattgggaatatgcacaaacttggcttctttaaccaagaatattattggaaaattctctaaaagttaatagggtaaattctctattttttgtaatgtgttcggtgatttcagaaagctagaaagtgtatgtgtggcatttgttttcactttttaaaacatccctaactgatcgaatatatcagtaatttcagaatcagatgcatcctttcataagaagtgagaggactctgacagccataacaggagtgccacttcatggtgcgaagtgaacactgtagtcttgttgttttcccaaagagaactccgtatgttctcttaggttgagtaacccactctgaattctggttacatgtgtttttctctccctccttaaataaagagaggggttaaacatgccctctaaaagtaggtggttttgaagagaataaattcatcagataacctcaagtcacatgagaatcttagtccatttacattgccttggctagtaaaagccatctatgtatatgtcttacctcatctcctaaaaggcagagtacaaagtaagccatgtatctcaggaaggtaacttcattttgtctatttgctgttgattgtaccaagggatggaagaagtaaatatagctcaggtagcactttatactcaggcagatctcagccctctactgagtcccttagccaagcagtttctttcaaagaagccagcaggcgaaaagcagggactgccactgcatttcatatcacactgttaaaagttgtgttttgaaattttatgtttagttgcacaaattgggccaaagaaacattgccttgaggaagatatgattggaaaatcaagagtgtagaagaataaatactgttttactgtccaaagacatgtttatagtgctctgtaaatgttcctttcctttgtagtctctggcaagatgctttaggaagataaaagtttgaggagaacaaacaggaattctgaattaagcacagagttgaagtttatacccgtttcacatgcttttcaagaatgtcgcaattactaagaagcagataatggtgttttttagaaacctaattgaagtatattcaaccaaatactttaatgtataaaataaatattatacaatatacttgtatagcagtttctgcttcacatttgattttttcaaatttaatatttatattagagatctatatatgtataaatatgtattttgtcaaatttgttacttaaatatatagagaccagttttctctggaagtttgtttaaatgacagaagcgtatatgaattcaagaaaatttaagctgcaaaaatgtatttgctataaaatgagaagtctcactgatagaggttctttattgctcattttttaaaaaatggactcttgaaatctgttaaaataaaattgtacatttggagatgtttca

SEQ ID NO: 695 - DNA, 3199 bp, Homo sapiens
cggctcgggccacgcccacctgtcctgcagcactggatgctttgtgagttggggattgttgcgtcccatatctggacccagaagggacttccctgctcggctggctctcggtttctctgctttcctccggagaaataacagcgtcttccgcgccgcgcatggagcctcccggccgccgcgagtgtccctttccttcctggcgctttcctgggttgcttctggcggccatggtgttgctgctgtactccttctccgatgcctgtgaggagccaccaacatttgaagctatggagctcattggtaaaccaaaaccctactatgagattggtgaacgagtagattataagtgtaaaaaaggatacttctatatacctcctcttgccacccatactatttgtgatcggaatcatacatggctacctgtctcagatgacgcctgttatagagaaacatgtccatatatacgggatcctttaaatggccaagcagtccctgcaaatgggacttacgagtttggttatcagatgcactttatttgtaatgagggttattacttaattggtgaagaaattctatattgtgaacttaaaggatcagtagcaatttggagcggtaagcccccaatatgtgaaaaggttttgtgtacaccacctccaaaaataaaaaatggaaaacacacctttagtgaagtagaagtatttgagtatcttgatgcagtaacttatagttgtgatcctgcacctggaccagatccattttcacttattggagagagcacgatttattgtggtgacaattcagtgtggagtcgtgctgctccagagtgtaaagtggtcaaatgtcgatttccagtagtcgaaaatggaaaacagatatcaggatttggaaaaaaattttactacaaagcaacagttatgtttgaatgcgataagggtttttacctcgatggcagcgacacaattgtctgtgacagtaacagtacttgggatcccccagttccaaagtgtcttaaaggtcctaggcctacttacaagcctccagtctcaaattatccaggatatcctaaacctgaggaaggaatacttgacagtttggatgtttgggtcattgctgtgattgttattgccatagttgttggagttgcagtaatttgtgttgtcccgtacagatatcttcaaaggaggaagaagaaagggaaagcagatggtggagctgaatatgccacttaccagactaaatcaaccactccagcagagcagagaggctgaatagattccacaacctggtttgccagttcatcttttgactctattaaaatcttcaatagttgttattctgtagtttcactctcatgagtgcaactgtggcttagctaatattgcaatgtggcttgaatgtaggtagcatcctttgatgcttctttgaaacttgtatgaatttgggtatgaacagattgcctgctttcccttaaataacacttagatttattggaccagtcagcacagcatgcctggttgtattaaagcagggatatgctgtattttataaaattggcaaaattagagaaatatagttcacaatgaaattatattttctttgtaaagaaagtggcttgaaatcttttttgttcaaagattaatgccaactcttaagattattctttcaccaactatagaatgtattttatatatcgttcattgtaaaaagcccttaaaaatatgtgtatactactttggctcttgtgcataaaaacaagaacactgaaaattgggaatatgcacaaacttggcttctttaaccaagaatattattggaaaattctctaaaagttaatagggtaaattctctattttttgtaatgtgttcggtgatttcagaaagctagaaagtgtatgtgtggcatttgttttcactttttaaaacatccctaactgatcgaatatatcagtaatttcagaatcagatgcatcctttcataagaagtgagaggactctgacagccataacaggagtgccacttcatggtgcgaagtgaacactgtagtcttgttgttttcccaaagagaactccgtatgttctcttaggttgagtaacccactctgaattctggttacatgtgtttttctctccctccttaaataaagagaggggttaaacatgccctctaaaagtaggtggttttgaagagaataaattcatcagataacctcaagtcacatgagaatcttagtccatttacattgccttggctagtaaaagccatctatgtatatgtcttacctcatctcctaaaaggcagagtacaaagtaagccatgtatctcaggaaggtaacttcattttgtctatttgctgttgattgtaccaagggatggaagaagtaaatatagctcaggtagcactttatactcaggcagatctcagccctctactgagtcccttagccaagcagtttctttcaaagaagccagcaggcgaaaagcagggactgccactgcatttcatatcacactgttaaaagttgtgttttgaaattttatgtttagttgcacaaattgggccaaagaaacattgccttgaggaagatatgattggaaaatcaagagtgtagaagaataaatactgttttactgtccaaagacatgtttatagtgctctgtaaatgttcctttcctttgtagtctctggcaagatgctttaggaagataaaagtttgaggagaacaaacaggaattctgaattaagcacagagttgaagtttatacccgtttcacatgcttttcaagaatgtcgcaattactaagaagcagataatggtgttttttagaaacctaattgaagtatattcaaccaaatactttaatgtataaaataaatattatacaatatacttgtatagcagtttctgcttcacatttgattttttcaaatttaatatttatattagagatctatatatgtataaatatgtattttgtcaaatttgttacttaaatatatagagaccagttttctctggaagtttgtttaaatgacagaagcgtatatgaattcaagaaaatttaagctgcaaaaatgtatttgctataaaatgagaagtctcactgatagaggttctttattgctcattttttaaaaaatggactcttgaaatctgttaaaataaaattgtacatttggagatgtttcatgatgatgt

SEQ ID NO: 696 - DNA, 2124 bp, Homo sapiens
gaattcggggataacagcgtcttccgcgccgcgcatggagcctcccggccgccgcgagtgtccctttccttcctggcgctttcctgggttgcttctggcggccatggtgttgctgctgtactccttctccgatgcctgtgaggagccaccaacatttgaagctatggagctcattggtaaaccaaaaccctactatgagattggtgaacgagtagattataagtgtaaaaaaggatacttctatatacctcctcttgccacccatactatttgtgatcggaatcatacatggctacctgtctcagatgacgcctgttatagagaaacatgtccatatatacgggatcctttaaatggccaagcagtccctgcaaatgggacttacgagtttggttatcagatgcactttatttgtaatgagggttattacttaattggtgaagaaattctatattgtgaacttaaaggatcagtagcaatttggagcggtaagcccccaatatgtgaaaaggttttgtgtacaccacctccaaaaataaaaaatggaaaacacacctttagtgaagtagaagtatttgagtatcttgatgcagtaacttatagttgtgatcctgcacctggaccagatccattttcacttattggagagagcacgatttattgtggtgacaattcagtgtggagtcgtgctgctccagagtgtaaagtggtcaaatgtcgatttccagtagtcgaaaatggaaaacagatatcaggatttggaaaaaaattttactacaaagcaacagttatgtttgaatgcgataagggtttttacctcgatggcagcgacacaattgtctgtgacagtaacagtacttgggatcccccagttccaaagtgtcttaaagtgtcgacttcttccactacaaaatctccagcgtccagtgcctcaggtcctaggcctacttacaagcctccagtctcaaattatccaggatatcctaaacctgaggaaggaatacttgacagtttggatgtttgggtcattgctgtgattgttattgccatagttgttggagttgcagtaatttgtgttgtcccgtacagatatcttcaaaggaggaagaagaaaggcacatacctaactgatgagacccacagagaagtaaaatttacttctctctgagaaggagagatgagagaaaggtttgcttttatcattaaaaggaaagcagatggtggagctgaatatgccacttaccagactaaatcaaccactccagcagagcagagaggctgaatagattccacaacctggtttgccagttcatcttttgactctattaaaatcttcaatagttgttattctgtagtttcactctcatgagtgcaactgtggcttagctaatattgcaatgtggcttgaatgtaggtagcatcctttgatgcttctttgaaacttgtatgaatttgggtatgaacagattgcctgctttcccttaaataacacttagatttattggaccagtcagcacagcatgcctggttgtattaaagcagggatatgctgtattttataaaattggcaaaattagagaaatatagttcacaatgaaattatattttctttgtaaagaaagtggcttgaaatcttttttgttcaaagattaatgccaactcttaagattattctttcaccaactatagaatgtattttatatatcgttcattgtaaaaagcccttaaaaatatgtgtatactactttggctcttgtgcataaaaacaagaacactgaaaattgggaatatgcacaaacttggcttctttaaccaagaatattattggaaaattctctaaaagtaaagggtaaattctctattttttgtaatgtgttcggtgatttcagaaagctagaaagtgtatgtgtggcatttgttttcactttttaaaacatccctaactgatcgaatatatcagtaatttcagaatcagatgcatcctttcataagaagtgagaggactctgacagccataacaggagtgccacttcatggtgcgaagtgaacactgtagtcttgttgttttcccaaagagaactccgtatgttctcttaggttgagtaacccactctgcccgaattc

SEQ ID NO: 697 - DNA, 3191 bp, Homo sapiens
gctcgggccacgcccacctgtcctgcagcactggatgctttgtgagttggggattgttgcgtcccatatctggacccagaagggacttccctgctcggctggctctcggtttctctgctttcctccggagaaataacagcgtcttccgcgccgcgcatggagcctcccggccgccgcgagtgtccctttccttcctggcgctttcctgggttgcttctggcggccatggtgttgctgctgtactccttctccgatgcctgtgaggagccaccaacatttgaagctatggagctcattggtaaaccaaaaccctactatgagattggtgaacgagtagattataagtgtaaaaaaggatacttctatatacctcctcttgccacccatactatttgtgatcggaatcatacatggctacctgtctcagatgacgcctgttatagagaaacatgtccatatatacgggatcctttaaatggccaagcagtccctgcaaatgggacttacgagtttggttatcagatgcactttatttgtaatgagggttattacttaattggtgaagaaattctatattgtgaacttaaaggatcagtagcaatttggagcggtaagcccccaatatgtgaaaaggttttgtgtacaccacctccaaaaataaaaaatggaaaacacacctttagtgaagtagaagtatttgagtatcttgatgcagtaacttatagttgtgatcctgcacctggaccagatccattttcacttattggagagagcacgatttattgtggtgacaattcagtgtggagtcgtgctgctccagagtgtaaagtggtcaaatgtcgatttccagtagtcgaaaatggaaaacagatatcaggatttggaaaaaaattttactacaaagcaacagttatgtttgaatgcgataagggtttttacctcgatggcagcgacacaattgtctgtgacagtaacagtacttgggatcccccagttccaaagtgtcttaaagtgtcgacttcttccactacaaaatctccagcgtccagtgcctcaggatatcctaaacctgaggaaggaatacttgacagtttggatgtttgggtcattgctgtgattgttattgccatagttgttggagttgcagtaatttgtgttgtcccgtacagatatcttcaaaggaggaagaagaaagggaaagcagatggtggagctgaatatgccacttaccagactaaatcaaccactccagcagagcagagaggctgaatagattccacaacctggtttgccagttcatcttttgactctattaaaatcttcaatagttgttattctgtagtttcactctcatgagtgcaactgtggcttagctaatattgcaatgtggcttgaatgtaggtagcatcctttgatgcttctttgaaacttgtatgaatttgggtatgaacagattgcctgctttcccttaaataacacttagatttattggaccagtcagcacagcatgcctggttgtattaaagcagggatatgctgtattttataaaattggcaaaattagagaaatatagttcacaatgaaattatattttctttgtaaagaaagtggcttgaaatcttttttgttcaaagattaatgccaactcttaagattattctttcaccaactatagaatgtattttatatatcgttcattgtaaaaagcccttaaaaatatgtgtatactactttggctcttgtgcataaaaacaagaacactgaaaattgggaatatgcacaaacttggcttctttaaccaagaatattattggaaaattctctaaaagttaatagggtaaattctctattttttgtaatgtgttcggtgatttcagaaagctagaaagtgtatgtgtggcatttgttttcactttttaaaacatccctaactgatcgaatatatcagtaatttcagaatcagatgcatcctttcataagaagtgagaggactctgacagccataacaggagtgccacttcatggtgcgaagtgaacactgtagtcttgttgttttcccaaagagaactccgtatgttctcttaggttgagtaacccactctgaattctggttacatgtgtttttctctccctccttaaataaagagaggggttaaacatgccctctaaaagtaggtggttttgaagagaataaattcatcagataacctcaagtcacatgagaatcttagtccatttacattgccttggctagtaaaagccatctatgtatatgtcttacctcatctcctaaaaggcagagtacaaagtaagccatgtatctcaggaaggtaacttcattttgtctatttgctgttgattgtaccaagggatggaagaagtaaatatagctcaggtagcactttatactcaggcagatctcagccctctactgagtcccttagccaagcagtttctttcaaagaagccagcaggcgaaaagcagggactgccactgcatttcatatcacactgttaaaagttgtgttttgaaattttatgtttagttgcacaaattgggccaaagaaacattgccttgaggaagatatgattggaaaatcaagagtgtagaagaataaatactgttttactgtccaaagacatgtttatagtgctctgtaaatgttcctttcctttgtagtctctggcaagatgctttaggaagataaaagtttgaggagaacaaacaggaattctgaattaagcacagagttgaagtttatacccgtttcacatgcttttcaagaatgtcgcaattactaagaagcagataatggtgttttttagaaacctaattgaagtatattcaaccaaatactttaatgtataaaataaatattatacaatatacttgtatagcagtttctgcttcacatttgattttttcaaatttaatatttatattagagatctatatatgtataaatatgtattttgtcaaatttgttacttaaatatatagagaccagttttctctggaagtttgtttaaatgacagaagcgtatatgaattcaagaaaatttaagctgcaaaaatgtatttgctataaaatgagaagtctcactgatagaggttctttattgctcattttttaaaaaatggactcttgaaatctgttaaaataaaattgtacatttggagatgtttca

SEQ ID NO: 698 - DNA, 3196 bp, Homo sapiens
gctcgggccacgcccacctgtcctgcagcactggatgctttgtgagttggggattgttgcgtcccatatctggacccagaagggacttccctgctcggctggctctcggtttctctgctttcctccggagaaataacagcgtcttccgcgccgcgcatggagcctcccggccgccgcgagtgtccctttccttcctggcgctttcctgggttgcttctggcggccatggtgttgctgctgtactccttctccgatgcctgtgaggagccaccaacatttgaagctatggagctcattggtaaaccaaaaccctactatgagattggtgaacgagtagattataagtgtaaaaaaggatacttctatatacctcctcttgccacccatactatttgtgatcggaatcatacatggctacctgtctcagatgacgcctgttatagagaaacatgtccatatatacgggatcctttaaatggccaagcagtccctgcaaatgggacttacgagtttggttatcagatgcactttatttgtaatgagggttattacttaattggtgaagaaattctatattgtgaacttaaaggatcagtagcaatttggagcggtaagcccccaatatgtgaaaaggttttgtgtacaccacctccaaaaataaaaaatggaaaacacacctttagtgaagtagaagtatttgagtatcttgatgcagtaacttatagttgtgatcctgcacctggaccagatccattttcacttattggagagagcacgatttattgtggtgacaattcagtgtggagtcgtgctgctccagagtgtaaagtggtcaaatgtcgatttccagtagtcgaaaatggaaaacagatatcaggatttggaaaaaaattttactacaaagcaacagttatgtttgaatgcgataagggtttttacctcgatggcagcgacacaattgtctgtgacagtaacagtacttgggatcccccagttccaaagtgtcttaaagtgtcgacttcttccactacaaaatctccagcgtccagtgcctcaggtcctaggcctacttacaagcctccagtctcaaattatccaggatatcctaaacctgaggaaggaatacttgacagtttggatgtttgggtcattgctgtgattgttattgccatagatatcttcaaaggaggaagaagaaagggaaagcagatggtggagctgaatatgccacttaccagactaaatcaaccactccagcagagcagagaggctgaatagattccacaacctggtttgccagttcatcttttgactctattaaaatcttcaatagttgttattctgtagtttcactctcatgagtgcaactgtggcttagctaatattgcaatgtggcttgaatgtaggtagcatcctttgatgcttctttgaaacttgtatgaatttgggtatgaacagattgcctgctttcccttaaataacacttagatttattggaccagtcagcacagcatgcctggttgtattaaagcagggatatgctgtattttataaaattggcaaaattagagaaatatagttcacaatgaaattatattttctttgtaaagaaagtggcttgaaatcttttttgttcaaagattaatgccaactcttaagattattctttcaccaactatagaatgtattttatatatcgttcattgtaaaaagcccttaaaaatatgtgtatactactttggctcttgtgcataaaaacaagaacactgaaaattgggaatatgcacaaacttggcttctttaaccaagaatattattggaaaattctctaaaagttaatagggtaaattctctattttttgtaatgtgttcggtgatttcagaaagctagaaagtgtatgtgtggcatttgttttcactttttaaaacatccctaactgatcgaatatatcagtaatttcagaatcagatgcatcctttcataagaagtgagaggactctgacagccataacaggagtgccacttcatggtgcgaagtgaacactgtagtcttgttgttttcccaaagagaactccgtatgttctcttaggttgagtaacccactctgaattctggttacatgtgtttttctctccctccttaaataaagagaggggttaaacatgccctctaaaagtaggtggttttgaagagaataaattcatcagataacctcaagtcacatgagaatcttagtccatttacattgccttggctagtaaaagccatctatgtatatgtcttacctcatctcctaaaaggcagagtacaaagtaagccatgtatctcaggaaggtaacttcattttgtctatttgctgttgattgtaccaagggatggaagaagtaaatatagctcaggtagcactttatactcaggcagatctcagccctctactgagtcccttagccaagcagtttctttcaaagaagccagcaggcgaaaagcagggactgccactgcatttcatatcacactgttaaaagttgtgttttgaaattttatgtttagttgcacaaattgggccaaagaaacattgccttgaggaagatatgattggaaaatcaagagtgtagaagaataaatactgttttactgtccaaagacatgtttatagtgctctgtaaatgttcctttcctttgtagtctctggcaagatgctttaggaagataaaagtttgaggagaacaaacaggaattctgaattaagcacagagttgaagtttatacccgtttcacatgcttttcaagaatgtcgcaattactaagaagcagataatggtgttttttagaaacctaattgaagtatattcaaccaaatactttaatgtataaaataaatattatacaatatacttgtatagcagtttctgcttcacatttgattttttcaaatttaatatttatattagagatctatatatgtataaatatgtattttgtcaaatttgttacttaaatatatagagaccagttttctctggaagtttgtttaaatgacagaagcgtatatgaattcaagaaaatttaagctgcaaaaatgtatttgctataaaatgagaagtctcactgatagaggttctttattgctcattttttaaaaaatggactcttgaaatctgttaaaataaaattgtacatttggagatgtttca

SEQ ID NO: 699 - DNA, 3126 bp, Homo sapiens
cggctcgggccacgcccacctgtcctgcagcactggatgctttgtgagttggggattgttgcgtcccatatctggacccagaagggacttccctgctcggctggctctcggtttctctgctttcctccggagaaataacagcgtcttccgcgccgcgcatggagcctcccggccgccgcgagtgtccctttccttcctggcgctttcctgggttgcttctggcggccatggtgttgctgctgtactccttctccgatgcctgtgaggagccaccaacatttgaagctatggagctcattggtaaaccaaaaccctactatgagattggtgaacgagtagattataagtgtaaaaaaggatacttctatatacctcctcttgccacccatactatttgtgatcggaatcatacatggctacctgtctcagatgacgcctgttatagagaaacatgtccatatatacgggatcctttaaatggccaagcagtccctgcaaatgggacttacgagtttggttatcagatgcactttatttgtaatgagggttattacttaattggtgaagaaattctatattgtgaacttaaaggatcagtagcaatttggagcggtaagcccccaatatgtgaaaaggttttgtgtacaccacctccaaaaataaaaaatggaaaacacacctttagtgaagtagaagtatttgagtatcttgatgcagtaacttatagttgtgatcctgcacctggaccagatccattttcacttattggagagagcacgatttattgtggtgacaattcagtgtggagtcgtgctgctccagagtgtaaagtggtcaaatgtcgatttccagtagtcgaaaatggaaaacagatatcaggatttggaaaaaaattttactacaaagcaacagttatgtttgaatgcgataagggtttttacctcgatggcagcgacacaattgtctgtgacagtaacagtacttgggatcccccagttccaaagtgtcttaaaggtcctaggcctacttacaagcctccagtctcaaattatccaggatatcctaaacctgaggaaggaatacttgacagtttggatgtttgggtcattgctgtgattgttattgccataggaaagcagatggtggagctgaatatgccacttaccagactaaatcaaccactccagcagagcagagaggctgaatagattccacaacctggtttgccagttcatcttttgactctattaaaatcttcaatagttgttattctgtagtttcactctcatgagtgcaactgtggcttagctaatattgcaatgtggcttgaatgtaggtagcatcctttgatgcttctttgaaacttgtatgaatttgggtatgaacagattgcctgctttcccttaaataacacttagatttattggaccagtcagcacagcatgcctggttgtattaaagcagggatatgctgtattttataaaattggcaaaattagagaaatatagttcacaatgaaattatattttctttgtaaagaaagtggcttgaaatcttttttgttcaaagattaatgccaactcttaagattattctttcaccaactatagaatgtattttatatatcgttcattgtaaaaagcccttaaaaatatgtgtatactactttggctcttgtgcataaaaacaagaacactgaaaattgggaatatgcacaaacttggcttctttaaccaagaatattattggaaaattctctaaaagttaatagggtaaattctctattttttgtaatgtgttcggtgatttcagaaagctagaaagtgtatgtgtggcatttgttttcactttttaaaacatccctaactgatcgaatatatcagtaatttcagaatcagatgcatcctttcataagaagtgagaggactctgacagccataacaggagtgccacttcatggtgcgaagtgaacactgtagtcttgttgttttcccaaagagaactccgtatgttctcttaggttgagtaacccactctgaattctggttacatgtgtttttctctccctccttaaataaagagaggggttaaacatgccctctaaaagtaggtggttttgaagagaataaattcatcagataacctcaagtcacatgagaatcttagtccatttacattgccttggctagtaaaagccatctatgtatatgtcttacctcatctcctaaaaggcagagtacaaagtaagccatgtatctcaggaaggtaacttcattttgtctatttgctgttgattgtaccaagggatggaagaagtaaatatagctcaggtagcactttatactcaggcagatctcagccctctactgagtcccttagccaagcagtttctttcaaagaagccagcaggcgaaaagcagggactgccactgcatttcatatcacactgttaaaagttgtgttttgaaattttatgtttagttgcacaaattgggccaaagaaacattgccttgaggaagatatgattggaaaatcaagagtgtagaagaataaatactgttttactgtccaaagacatgtttatagtgctctgtaaatgttcctttcctttgtagtctctggcaagatgctttaggaagataaaagtttgaggagaacaaacaggaattctgaattaagcacagagttgaagtttatacccgtttcacatgcttttcaagaatgtcgcaattactaagaagcagataatggtgttttttagaaacctaattgaagtatattcaaccaaatactttaatgtataaaataaatattatacaatatacttgtatagcagtttctgcttcacatttgattttttcaaatttaatatttatattagagatctatatatgtataaatatgtattttgtcaaatttgttacttaaatatatagagaccagttttctctggaagtttgtttaaatgacagaagcgtatatgaattcaagaaaatttaagctgcaaaaatgtatttgctataaaatgagaagtctcactgatagaggttctttattgctcattttttaaaaaatggactcttgaaatctgttaaaataaaattgtacatttggagatgtttca

SEQ ID NO: 700 - DNA, 3328 bp, Homo sapiens
cggctcgggccacgcccacctgtcctgcagcactggatgctttgtgagttggggattgttgcgtcccatatctggacccagaagggacttccctgctcggctggctctcggtttctctgctttcctccggagaaataacagcgtcttccgcgccgcgcatggagcctcccggccgccgcgagtgtccctttccttcctggcgctttcctgggttgcttctggcggccatggtgttgctgctgtactccttctccgatgcctgtgaggagccaccaacatttgaagctatggagctcattggtaaaccaaaaccctactatgagattggtgaacgagtagattataagtgtaaaaaaggatacttctatatacctcctcttgccacccatactatttgtgatcggaatcatacatggctacctgtctcagatgacgcctgttatagagaaacatgtccatatatacgggatcctttaaatggccaagcagtccctgcaaatgggacttacgagtttggttatcagatgcactttatttgtaatgagggttattacttaattggtgaagaaattctatattgtgaacttaaaggatcagtagcaatttggagcggtaagcccccaatatgtgaaaaggttttgtgtacaccacctccaaaaataaaaaatggaaaacacacctttagtgaagtagaagtatttgagtatcttgatgcagtaacttatagttgtgatcctgcacctggaccagatccattttcacttattggagagagcacgatttattgtggtgacaattcagtgtggagtcgtgctgctccagagtgtaaagtggtcaaatgtcgatttccagtagtcgaaaatggaaaacagatatcaggatttggaaaaaaattttactacaaagcaacagttatgtttgaatgcgataagggtttttacctcgatggcagcgacacaattgtctgtgacagtaacagtacttgggatcccccagttccaaagtgtcttaaagtgtcgacttcttccactacaaaatctccagcgtccagtgcctcaggtcctaggcctacttacaagcctccagtctcaaattatccaggatatcctaaacctgaggaaggaatacttgacagtttggatgtttgggtcattgctgtgattgttattgccatagttgttggagttgcagtaatttgtgttgtcccgtacagatatcttcaaaggaggaagaagaaaggcacatacctaactgatgagacccacagagaagtaaaatttacttctctctgagaaggagagatgagagaaaggtttgcttttatcattaaaaggaaagcagatggtggagctgaatatgccacttaccagactaaatcaaccactccagcagagcagagaggctgaatagattccacaacctggtttgccagttcatcttttgactctattaaaatcttcaatagttgttattctgtagtttcactctcatgagtgcaactgtggcttagctaatattgcaatgtggcttgaatgtaggtagcatcctttgatgcttctttgaaacttgtatgaatttgggtatgaacagattgcctgctttcccttaaataacacttagatttattggaccagtcagcacagcatgcctggttgtattaaagcagggatatgctgtattttataaaattggcaaaattagagaaatatagttcacaatgaaattatattttctttgtaaagaaagtggcttgaaatcttttttgttcaaagattaatgccaactcttaagattattctttcaccaactatagaatgtattttatatatcgttcattgtaaaaagcccttaaaaatatgtgtatactactttggctcttgtgcataaaaacaagaacactgaaaattgggaatatgcacaaacttggcttctttaaccaagaatattattggaaaattctctaaaagttaatagggtaaattctctattttttgtaatgtgttcggtgatttcagaaagctagaaagtgtatgtgtggcatttgttttcactttttaaaacatccctaactgatcgaatatatcagtaatttcagaatcagatgcatcctttcataagaagtgagaggactctgacagccataacaggagtgccacttcatggtgcgaagtgaacactgtagtcttgttgttttcccaaagagaactccgtatgttctcttaggttgagtaacccactctgaattctggttacatgtgtttttctctccctccttaaataaagagaggggttaaacatgccctctaaaagtaggtggttttgaagagaataaattcatcagataacctcaagtcacatgagaatcttagtccatttacattgccttggctagtaaaagccatctatgtatatgtcttacctcatctcctaaaaggcagagtacaaagtaagccatgtatctcaggaaggtaacttcattttgtctatttgctgttgattgtaccaagggatggaagaagtaaatatagctcaggtagcactttatactcaggcagatctcagccctctactgagtcccttagccaagcagtttctttcaaagaagccagcaggcgaaaagcagggactgccactgcatttcatatcacactgttaaaagttgtgttttgaaattttatgtttagttgcacaaattgggccaaagaaacattgccttgaggaagatatgattggaaaatcaagagtgtagaagaataaatactgttttactgtccaaagacatgtttatagtgctctgtaaatgttcctttcctttgtagtctctggcaagatgctttaggaagataaaagtttgaggagaacaaacaggaattctgaattaagcacagagttgaagtttatacccgtttcacatgcttttcaagaatgtcgcaattactaagaagcagataatggtgttttttagaaacctaattgaagtatattcaaccaaatactttaatgtataaaataaatattatacaatatacttgtatagcagtttctgcttcacatttgattttttcaaatttaatatttatattagagatctatatatgtataaatatgtattttgtcaaatttgttacttaaatatatagagaccagttttctctggaagtttgtttaaatgacagaagcgtatatgaattcaagaaaatttaagctgcaaaaatgtatttgctataaaatgagaagtctcactgatagaggttctttattgctcattttttaaaaaatggactcttgaaatctgttaaaataaaattgtacatttggagatgtttca

SEQ ID NO: 701 - DNA, 3329 bp, Homo sapiens
gctcgggccacgcccacctgtcctgcagcactggatgctttgtgagttggggattgttgcgtcccatatctggacccagaagggacttccctgctcggctggctctcggtttctctgctttcctccggagaaataacagcgtcttccgcgccgcgcatggagcctcccggccgccgcgagtgtccctttccttcctggcgctttcctgggttgcttctggcggccatggtgttgctgctgtactccttctccgatgcctgtgaggagccaccaacatttgaagctatggagctcattggtaaaccaaaaccctactatgagattggtgaacgagtagattataagtgtaaaaaaggatacttctatatacctcctcttgccacccatactatttgtgatcggaatcatacatggctacctgtctcagatgacgcctgttatagagaaacatgtccatatatacgggatcctttaaatggccaagcagtccctgcaaatgggacttacgagtttggttatcagatgcactttatttgtaatgagggttattacttaattggtgaagaaattctatattgtgaacttaaaggatcagtagcaatttggagcggtaagcccccaatatgtgaaaaggttttgtgtacaccacctccaaaaataaaaaatggaaaacacacctttagtgaagtagaagtatttgagtatcttgatgcagtaacttatagttgtgatcctgcacctggaccagatccattttcacttattggagagagcacgatttattgtggtgacaattcagtgtggagtcgtgctgctccagagtgtaaagtggtcaaatgtcgatttccagtagtcgaaaatggaaaacagatatcaggatttggaaaaaaattttactacaaagcaacagttatgtttgaatgcgataagggtttttacctcgatggcagcgacacaattgtctgtgacagtaacagtacttgggatcccccagttccaaagtgtcttaaagtgctgcctccatctagtacaaaacctccagctttgagtcattcagtgtcgacttcttccactacaaaatctccagcgtccagtgcctcaggatatcctaaacctgaggaaggaatacttgacagtttggatgtttgggtcattgctgtgattgttattgccatagttgttggagttgcagtaatttgtgttgtcccgtacagatatcttcaaaggaggaagaagaaaggcacatacctaactgatgagacccacagagaagtaaaatttacttctctctgagaaggagagatgagagaaaggtttgcttttatcattaaaaggaaagcagatggtggagctgaatatgccacttaccagactaaatcaaccactccagcagagcagagaggctgaatagattccacaacctggtttgccagttcatcttttgactctattaaaatcttcaatagttgttattctgtagtttcactctcatgagtgcaactgtggcttagctaatattgcaatgtggcttgaatgtaggtagcatcctttgatgcttctttgaaacttgtatgaatttgggtatgaacagattgcctgctttcccttaaataacacttagatttattggaccagtcagcacagcatgcctggttgtattaaagcagggatatgctgtattttataaaattggcaaaattagagaaatatagttcacaatgaaattatattttctttgtaaagaaagtggcttgaaatcttttttgttcaaagattaatgccaactcttaagattattctttcaccaactatagaatgtattttatatatcgttcattgtaaaaagcccttaaaaatatgtgtatactactttggctcttgtgcataaaaacaagaacactgaaaattgggaatatgcacaaacttggcttctttaaccaagaatattattggaaaattctctaaaagttaatagggtaaattctctattttttgtaatgtgttcggtgatttcagaaagctagaaagtgtatgtgtggcatttgttttcactttttaaaacatccctaactgatcgaatatatcagtaatttcagaatcagatgcatcctttcataagaagtgagaggactctgacagccataacaggagtgccacttcatggtgcgaagtgaacactgtagtcttgttgttttcccaaagagaactccgtatgttctcttaggttgagtaacccactctgaattctggttacatgtgtttttctctccctccttaaataaagagaggggttaaacatgccctctaaaagtaggtggttttgaagagaataaattcatcagataacctcaagtcacatgagaatcttagtccatttacattgccttggctagtaaaagccatctatgtatatgtcttacctcatctcctaaaaggcagagtacaaagtaagccatgtatctcaggaaggtaacttcattttgtctatttgctgttgattgtaccaagggatggaagaagtaaatatagctcaggtagcactttatactcaggcagatctcagccctctactgagtcccttagccaagcagtttctttcaaagaagccagcaggcgaaaagcagggactgccactgcatttcatatcacactgttaaaagttgtgttttgaaattttatgtttagttgcacaaattgggccaaagaaacattgccttgaggaagatatgattggaaaatcaagagtgtagaagaataaatactgttttactgtccaaagacatgtttatagtgctctgtaaatgttcctttcctttgtagtctctggcaagatgctttaggaagataaaagtttgaggagaacaaacaggaattctgaattaagcacagagttgaagtttatacccgtttcacatgcttttcaagaatgtcgcaattactaagaagcagataatggtgttttttagaaacctaattgaagtatattcaaccaaatactttaatgtataaaataaatattatacaatatacttgtatagcagtttctgcttcacatttgattttttcaaatttaatatttatattagagatctatatatgtataaatatgtattttgtcaaatttgttacttaaatatatagagaccagttttctctggaagtttgtttaaatgacagaagcgtatatgaattcaagaaaatttaagctgcaaaaatgtatttgctataaaatgagaagtctcactgatagaggttctttattgctcattttttaaaaaatggactcttgaaatctgttaaaataaaattgtacatttggagatgtttca

SEQ ID NO: 702 - DNA, 3236 bp, Homo sapiens
gctcgggccacgcccacctgtcctgcagcactggatgctttgtgagttggggattgttgcgtcccatatctggacccagaagggacttccctgctcggctggctctcggtttctctgctttcctccggagaaataacagcgtcttccgcgccgcgcatggagcctcccggccgccgcgagtgtccctttccttcctggcgctttcctgggttgcttctggcggccatggtgttgctgctgtactccttctccgatgcctgtgaggagccaccaacatttgaagctatggagctcattggtaaaccaaaaccctactatgagattggtgaacgagtagattataagtgtaaaaaaggatacttctatatacctcctcttgccacccatactatttgtgatcggaatcatacatggctacctgtctcagatgacgcctgttatagagaaacatgtccatatatacgggatcctttaaatggccaagcagtccctgcaaatgggacttacgagtttggttatcagatgcactttatttgtaatgagggttattacttaattggtgaagaaattctatattgtgaacttaaaggatcagtagcaatttggagcggtaagcccccaatatgtgaaaaggttttgtgtacaccacctccaaaaataaaaaatggaaaacacacctttagtgaagtagaagtatttgagtatcttgatgcagtaacttatagttgtgatcctgcacctggaccagatccattttcacttattggagagagcacgatttattgtggtgacaattcagtgtggagtcgtgctgctccagagtgtaaagtggtcaaatgtcgatttccagtagtcgaaaatggaaaacagatatcaggatttggaaaaaaattttactacaaagcaacagttatgtttgaatgcgataagggtttttacctcgatggcagcgacacaattgtctgtgacagtaacagtacttgggatcccccagttccaaagtgtcttaaagtgctgcctccatctagtacaaaacctccagctttgagtcattcagtgtcgacttcttccactacaaaatctccagcgtccagtgcctcaggatatcctaaacctgaggaaggaatacttgacagtttggatgtttgggtcattgctgtgattgttattgccatagttgttggagttgcagtaatttgtgttgtcccgtacagatatcttcaaaggaggaagaagaaagggaaagcagatggtggagctgaatatgccacttaccagactaaatcaaccactccagcagagcagagaggctgaatagattccacaacctggtttgccagttcatcttttgactctattaaaatcttcaatagttgttattctgtagtttcactctcatgagtgcaactgtggcttagctaatattgcaatgtggcttgaatgtaggtagcatcctttgatgcttctttgaaacttgtatgaatttgggtatgaacagattgcctgctttcccttaaataacacttagatttattggaccagtcagcacagcatgcctggttgtattaaagcagggatatgctgtattttataaaattggcaaaattagagaaatatagttcacaatgaaattatattttctttgtaaagaaagtggcttgaaatcttttttgttcaaagattaatgccaactcttaagattattctttcaccaactatagaatgtattttatatatcgttcattgtaaaaagcccttaaaaatatgtgtatactactttggctcttgtgcataaaaacaagaacactgaaaattgggaatatgcacaaacttggcttctttaaccaagaatattattggaaaattctctaaaagttaatagggtaaattctctattttttgtaatgtgttcggtgatttcagaaagctagaaagtgtatgtgtggcatttgttttcactttttaaaacatccctaactgatcgaatatatcagtaatttcagaatcagatgcatcctttcataagaagtgagaggactctgacagccataacaggagtgccacttcatggtgcgaagtgaacactgtagtcttgttgttttcccaaagagaactccgtatgttctcttaggttgagtaacccactctgaattctggttacatgtgtttttctctccctccttaaataaagagaggggttaaacatgccctctaaaagtaggtggttttgaagagaataaattcatcagataacctcaagtcacatgagaatcttagtccatttacattgccttggctagtaaaagccatctatgtatatgtcttacctcatctcctaaaaggcagagtacaaagtaagccatgtatctcaggaaggtaacttcattttgtctatttgctgttgattgtaccaagggatggaagaagtaaatatagctcaggtagcactttatactcaggcagatctcagccctctactgagtcccttagccaagcagtttctttcaaagaagccagcaggcgaaaagcagggactgccactgcatttcatatcacactgttaaaagttgtgttttgaaattttatgtttagttgcacaaattgggccaaagaaacattgccttgaggaagatatgattggaaaatcaagagtgtagaagaataaatactgttttactgtccaaagacatgtttatagtgctctgtaaatgttcctttcctttgtagtctctggcaagatgctttaggaagataaaagtttgaggagaacaaacaggaattctgaattaagcacagagttgaagtttatacccgtttcacatgcttttcaagaatgtcgcaattactaagaagcagataatggtgttttttagaaacctaattgaagtatattcaaccaaatactttaatgtataaaataaatattatacaatatacttgtatagcagtttctgcttcacatttgattttttcaaatttaatatttatattagagatctatatatgtataaatatgtattttgtcaaatttgttacttaaatatatagagaccagttttctctggaagtttgtttaaatgacagaagcgtatatgaattcaagaaaatttaagctgcaaaaatgtatttgctataaaatgagaagtctcactgatagaggttctttattgctcattttttaaaaaatggactcttgaaatctgttaaaataaaattgtacatttggagatgtttca

SEQ ID NO: 703 - DNA, 3284 bp, Homo sapiens
gctcgggccacgcccacctgtcctgcagcactggatgctttgtgagttggggattgttgcgtcccatatctggacccagaagggacttccctgctcggctggctctcggtttctctgctttcctccggagaaataacagcgtcttccgcgccgcgcatggagcctcccggccgccgcgagtgtccctttccttcctggcgctttcctgggttgcttctggcggccatggtgttgctgctgtactccttctccgatgcctgtgaggagccaccaacatttgaagctatggagctcattggtaaaccaaaaccctactatgagattggtgaacgagtagattataagtgtaaaaaaggatacttctatatacctcctcttgccacccatactatttgtgatcggaatcatacatggctacctgtctcagatgacgcctgttatagagaaacatgtccatatatacgggatcctttaaatggccaagcagtccctgcaaatgggacttacgagtttggttatcagatgcactttatttgtaatgagggttattacttaattggtgaagaaattctatattgtgaacttaaaggatcagtagcaatttggagcggtaagcccccaatatgtgaaaaggttttgtgtacaccacctccaaaaataaaaaatggaaaacacacctttagtgaagtagaagtatttgagtatcttgatgcagtaacttatagttgtgatcctgcacctggaccagatccattttcacttattggagagagcacgatttattgtggtgacaattcagtgtggagtcgtgctgctccagagtgtaaagtggtcaaatgtcgatttccagtagtcgaaaatggaaaacagatatcaggatttggaaaaaaattttactacaaagcaacagttatgtttgaatgcgataagggtttttacctcgatggcagcgacacaattgtctgtgacagtaacagtacttgggatcccccagttccaaagtgtcttaaagtgtcgacttcttccactacaaaatctccagcgtccagtgcctcaggatatcctaaacctgaggaaggaatacttgacagtttggatgtttgggtcattgctgtgattgttattgccatagttgttggagttgcagtaatttgtgttgtcccgtacagatatcttcaaaggaggaagaagaaaggcacatacctaactgatgagacccacagagaagtaaaatttacttctctctgagaaggagagatgagagaaaggtttgcttttatcattaaaaggaaagcagatggtggagctgaatatgccacttaccagactaaatcaaccactccagcagagcagagaggctgaatagattccacaacctggtttgccagttcatcttttgactctattaaaatcttcaatagttgttattctgtagtttcactctcatgagtgcaactgtggcttagctaatattgcaatgtggcttgaatgtaggtagcatcctttgatgcttctttgaaacttgtatgaatttgggtatgaacagattgcctgctttcccttaaataacacttagatttattggaccagtcagcacagcatgcctggttgtattaaagcagggatatgctgtattttataaaattggcaaaattagagaaatatagttcacaatgaaattatattttctttgtaaagaaagtggcttgaaatcttttttgttcaaagattaatgccaactcttaagattattctttcaccaactatagaatgtattttatatatcgttcattgtaaaaagcccttaaaaatatgtgtatactactttggctcttgtgcataaaaacaagaacactgaaaattgggaatatgcacaaacttggcttctttaaccaagaatattattggaaaattctctaaaagttaatagggtaaattctctattttttgtaatgtgttcggtgatttcagaaagctagaaagtgtatgtgtggcatttgttttcactttttaaaacatccctaactgatcgaatatatcagtaatttcagaatcagatgcatcctttcataagaagtgagaggactctgacagccataacaggagtgccacttcatggtgcgaagtgaacactgtagtcttgttgttttcccaaagagaactccgtatgttctcttaggttgagtaacccactctgaattctggttacatgtgtttttctctccctccttaaataaagagaggggttaaacatgccctctaaaagtaggtggttttgaagagaataaattcatcagataacctcaagtcacatgagaatcttagtccatttacattgccttggctagtaaaagccatctatgtatatgtcttacctcatctcctaaaaggcagagtacaaagtaagccatgtatctcaggaaggtaacttcattttgtctatttgctgttgattgtaccaagggatggaagaagtaaatatagctcaggtagcactttatactcaggcagatctcagccctctactgagtcccttagccaagcagtttctttcaaagaagccagcaggcgaaaagcagggactgccactgcatttcatatcacactgttaaaagttgtgttttgaaattttatgtttagttgcacaaattgggccaaagaaacattgccttgaggaagatatgattggaaaatcaagagtgtagaagaataaatactgttttactgtccaaagacatgtttatagtgctctgtaaatgttcctttcctttgtagtctctggcaagatgctttaggaagataaaagtttgaggagaacaaacaggaattctgaattaagcacagagttgaagtttatacccgtttcacatgcttttcaagaatgtcgcaattactaagaagcagataatggtgttttttagaaacctaattgaagtatattcaaccaaatactttaatgtataaaataaatattatacaatatacttgtatagcagtttctgcttcacatttgattttttcaaatttaatatttatattagagatctatatatgtataaatatgtattttgtcaaatttgttacttaaatatatagagaccagttttctctggaagtttgtttaaatgacagaagcgtatatgaattcaagaaaatttaagctgcaaaaatgtatttgctataaaatgagaagtctcactgatagaggttctttattgctcattttttaaaaaatggactcttgaaatctgttaaaataaaattgtacatttggagatgtttca

SEQ ID NO: 704 - DNA, 3146 bp, Homo sapiens
gctcgggccacgcccacctgtcctgcagcactggatgctttgtgagttggggattgttgcgtcccatatctggacccagaagggacttccctgctcggctggctctcggtttctctgctttcctccggagaaataacagcgtcttccgcgccgcgcatggagcctcccggccgccgcgagtgtccctttccttcctggcgctttcctgggttgcttctggcggccatggtgttgctgctgtactccttctccgatgcctgtgaggagccaccaacatttgaagctatggagctcattggtaaaccaaaaccctactatgagattggtgaacgagtagattataagtgtaaaaaaggatacttctatatacctcctcttgccacccatactatttgtgatcggaatcatacatggctacctgtctcagatgacgcctgttatagagaaacatgtccatatatacgggatcctttaaatggccaagcagtccctgcaaatgggacttacgagtttggttatcagatgcactttatttgtaatgagggttattacttaattggtgaagaaattctatattgtgaacttaaaggatcagtagcaatttggagcggtaagcccccaatatgtgaaaaggttttgtgtacaccacctccaaaaataaaaaatggaaaacacacctttagtgaagtagaagtatttgagtatcttgatgcagtaacttatagttgtgatcctgcacctggaccagatccattttcacttattggagagagcacgatttattgtggtgacaattcagtgtggagtcgtgctgctccagagtgtaaagtggtcaaatgtcgatttccagtagtcgaaaatggaaaacagatatcaggatttggaaaaaaattttactacaaagcaacagttatgtttgaatgcgataagggtttttacctcgatggcagcgacacaattgtctgtgacagtaacagtacttgggatcccccagttccaaagtgtcttaaaggatatcctaaacctgaggaaggaatacttgacagtttggatgtttgggtcattgctgtgattgttattgccatagttgttggagttgcagtaatttgtgttgtcccgtacagatatcttcaaaggaggaagaagaaagggaaagcagatggtggagctgaatatgccacttaccagactaaatcaaccactccagcagagcagagaggctgaatagattccacaacctggtttgccagttcatcttttgactctattaaaatcttcaatagttgttattctgtagtttcactctcatgagtgcaactgtggcttagctaatattgcaatgtggcttgaatgtaggtagcatcctttgatgcttctttgaaacttgtatgaatttgggtatgaacagattgcctgctttcccttaaataacacttagatttattggaccagtcagcacagcatgcctggttgtattaaagcagggatatgctgtattttataaaattggcaaaattagagaaatatagttcacaatgaaattatattttctttgtaaagaaagtggcttgaaatcttttttgttcaaagattaatgccaactcttaagattattctttcaccaactatagaatgtattttatatatcgttcattgtaaaaagcccttaaaaatatgtgtatactactttggctcttgtgcataaaaacaagaacactgaaaattgggaatatgcacaaacttggcttctttaaccaagaatattattggaaaattctctaaaagttaatagggtaaattctctattttttgtaatgtgttcggtgatttcagaaagctagaaagtgtatgtgtggcatttgttttcactttttaaaacatccctaactgatcgaatatatcagtaatttcagaatcagatgcatcctttcataagaagtgagaggactctgacagccataacaggagtgccacttcatggtgcgaagtgaacactgtagtcttgttgttttcccaaagagaactccgtatgttctcttaggttgagtaacccactctgaattctggttacatgtgtttttctctccctccttaaataaagagaggggttaaacatgccctctaaaagtaggtggttttgaagagaataaattcatcagataacctcaagtcacatgagaatcttagtccatttacattgccttggctagtaaaagccatctatgtatatgtcttacctcatctcctaaaaggcagagtacaaagtaagccatgtatctcaggaaggtaacttcattttgtctatttgctgttgattgtaccaagggatggaagaagtaaatatagctcaggtagcactttatactcaggcagatctcagccctctactgagtcccttagccaagcagtttctttcaaagaagccagcaggcgaaaagcagggactgccactgcatttcatatcacactgttaaaagttgtgttttgaaattttatgtttagttgcacaaattgggccaaagaaacattgccttgaggaagatatgattggaaaatcaagagtgtagaagaataaatactgttttactgtccaaagacatgtttatagtgctctgtaaatgttcctttcctttgtagtctctggcaagatgctttaggaagataaaagtttgaggagaacaaacaggaattctgaattaagcacagagttgaagtttatacccgtttcacatgcttttcaagaatgtcgcaattactaagaagcagataatggtgttttttagaaacctaattgaagtatattcaaccaaatactttaatgtataaaataaatattatacaatatacttgtatagcagtttctgcttcacatttgattttttcaaatttaatatttatattagagatctatatatgtataaatatgtattttgtcaaatttgttacttaaatatatagagaccagttttctctggaagtttgtttaaatgacagaagcgtatatgaattcaagaaaatttaagctgcaaaaatgtatttgctataaaatgagaagtctcactgatagaggttctttattgctcattttttaaaaaatggactcttgaaatctgttaaaataaaattgtacatttggagatgtttca

SEQ ID NO: 705 - DNA, 3239 bp, Homo sapiens
gctcgggccacgcccacctgtcctgcagcactggatgctttgtgagttggggattgttgcgtcccatatctggacccagaagggacttccctgctcggctggctctcggtttctctgctttcctccggagaaataacagcgtcttccgcgccgcgcatggagcctcccggccgccgcgagtgtccctttccttcctggcgctttcctgggttgcttctggcggccatggtgttgctgctgtactccttctccgatgcctgtgaggagccaccaacatttgaagctatggagctcattggtaaaccaaaaccctactatgagattggtgaacgagtagattataagtgtaaaaaaggatacttctatatacctcctcttgccacccatactatttgtgatcggaatcatacatggctacctgtctcagatgacgcctgttatagagaaacatgtccatatatacgggatcctttaaatggccaagcagtccctgcaaatgggacttacgagtttggttatcagatgcactttatttgtaatgagggttattacttaattggtgaagaaattctatattgtgaacttaaaggatcagtagcaatttggagcggtaagcccccaatatgtgaaaaggttttgtgtacaccacctccaaaaataaaaaatggaaaacacacctttagtgaagtagaagtatttgagtatcttgatgcagtaacttatagttgtgatcctgcacctggaccagatccattttcacttattggagagagcacgatttattgtggtgacaattcagtgtggagtcgtgctgctccagagtgtaaagtggtcaaatgtcgatttccagtagtcgaaaatggaaaacagatatcaggatttggaaaaaaattttactacaaagcaacagttatgtttgaatgcgataagggtttttacctcgatggcagcgacacaattgtctgtgacagtaacagtacttgggatcccccagttccaaagtgtcttaaaggatatcctaaacctgaggaaggaatacttgacagtttggatgtttgggtcattgctgtgattgttattgccatagttgttggagttgcagtaatttgtgttgtcccgtacagatatcttcaaaggaggaagaagaaaggcacatacctaactgatgagacccacagagaagtaaaatttacttctctctgagaaggagagatgagagaaaggtttgcttttatcattaaaaggaaagcagatggtggagctgaatatgccacttaccagactaaatcaaccactccagcagagcagagaggctgaatagattccacaacctggtttgccagttcatcttttgactctattaaaatcttcaatagttgttattctgtagtttcactctcatgagtgcaactgtggcttagctaatattgcaatgtggcttgaatgtaggtagcatcctttgatgcttctttgaaacttgtatgaatttgggtatgaacagattgcctgctttcccttaaataacacttagatttattggaccagtcagcacagcatgcctggttgtattaaagcagggatatgctgtattttataaaattggcaaaattagagaaatatagttcacaatgaaattatattttctttgtaaagaaagtggcttgaaatcttttttgttcaaagattaatgccaactcttaagattattctttcaccaactatagaatgtattttatatatcgttcattgtaaaaagcccttaaaaatatgtgtatactactttggctcttgtgcataaaaacaagaacactgaaaattgggaatatgcacaaacttggcttctttaaccaagaatattattggaaaattctctaaaagttaatagggtaaattctctattttttgtaatgtgttcggtgatttcagaaagctagaaagtgtatgtgtggcatttgttttcactttttaaaacatccctaactgatcgaatatatcagtaatttcagaatcagatgcatcctttcataagaagtgagaggactctgacagccataacaggagtgccacttcatggtgcgaagtgaacactgtagtcttgttgttttcccaaagagaactccgtatgttctcttaggttgagtaacccactctgaattctggttacatgtgtttttctctccctccttaaataaagagaggggttaaacatgccctctaaaagtaggtggttttgaagagaataaattcatcagataacctcaagtcacatgagaatcttagtccatttacattgccttggctagtaaaagccatctatgtatatgtcttacctcatctcctaaaaggcagagtacaaagtaagccatgtatctcaggaaggtaacttcattttgtctatttgctgttgattgtaccaagggatggaagaagtaaatatagctcaggtagcactttatactcaggcagatctcagccctctactgagtcccttagccaagcagtttctttcaaagaagccagcaggcgaaaagcagggactgccactgcatttcatatcacactgttaaaagttgtgttttgaaattttatgtttagttgcacaaattgggccaaagaaacattgccttgaggaagatatgattggaaaatcaagagtgtagaagaataaatactgttttactgtccaaagacatgtttatagtgctctgtaaatgttcctttcctttgtagtctctggcaagatgctttaggaagataaaagtttgaggagaacaaacaggaattctgaattaagcacagagttgaagtttatacccgtttcacatgcttttcaagaatgtcgcaattactaagaagcagataatggtgttttttagaaacctaattgaagtatattcaaccaaatactttaatgtataaaataaatattatacaatatacttgtatagcagtttctgcttcacatttgattttttcaaatttaatatttatattagagatctatatatgtataaatatgtattttgtcaaatttgttacttaaatatatagagaccagttttctctggaagtttgtttaaatgacagaagcgtatatgaattcaagaaaatttaagctgcaaaaatgtatttgctataaaatgagaagtctcactgatagaggttctttattgctcattttttaaaaaatggactcttgaaatctgttaaaataaaattgtacatttggagatgtttca

SEQ ID NO: 706 - DNA, 5559 bp, Homo sapiens
ctcagtcagtcgcagccacctccccctgcgctggacttggaggaagggggtggagaatgagaggacgctctccgttctccgccccgcctccccgccccacgtgacatcggtacgtgggagcaacaccgctggatgccccctccctactaaatggttaaaacaatcatcataactcttaaggcccttttatggctgtttcttagcgaaacctcacaacatgcctatggggtgggaattgatgttccattccacagctgactccactgaagcccatgaggaagaaattggcccaaatcacagtcccctctgattacagaacagaaaaagtcagctaaaatctcaggatcacttttttcaggtgatgggaggatttcagaagttctgtggacacctgaaattgggcacaaaatcaggtgtttcatgccagtgggcattttccaggtagagggatcatatttctctcgagagtctaaaagtgtgttgaacaagcccactctttacagatggggagactgagcctggggacagggagtggcctgctcagaaaagactcagaaattaaatccagtccagtgggttgatatttacccaaatttccagcctggggagattgatgcacccaagagaagaacccagaaatgaaactttgttcttttatgctaaaaaataaaattccccagagtgcttacaatctctcctcccactccctttttcctgccctaaataaataatggcgaatgagcacccagccagggatgtgtctgatcaaacaatcatggatcaatagctatgtttggagaaggaatttgtggctgctccagctactgggcattttgtctggtccagttcatgtaatctcccaacaccccatgaagcaaggctttgttaatcctattttactgaaaatgaactaagactcagagagataaagctgttgcccaatgagccttctttctgccctccagatccacggtgctaattccccttccgatgacctaatgattctgagcttggcaaaggtcttatctcccagctcgcccaggcccagtgttccaggaatgtgacctttgctgcagcagccgctggagggggcagaggggatgggctggaggttgagcaaacagagcagcagaaaaggcagttcctcttctccagtgccctccttccctgtctctgcctctccctcccttcctcaggcatcagagcggagacttcagggagaccagagcccagcttgccaggcactgagctagaagccctgccatggcacccctgagaccccttctcatactggccctgctggcatgggttgctctggctgaccaaggtacaggggagtgttggtggccatctgggtcaatgtagggagggcgagggtggtctgggcttggtggcaccgactgacactccttcctcatagagtcatgcaagggccgctgcactgagggcttcaacgtggacaagaagtgccagtgtgacgagctctgctcttactaccagagctgctgcacagactatacggctgagtgcaagccccaaggtgtgttcagagcccaggtgggtgggctggggtgccccctgctgctggagactcactaccatccactctctgcagtgactcgcggggatgtgttcactatgccggaggatgagtacacggtctatgacgatggcgaggagaaaaacaatgccactgtccatgaacaggtggggggcccctccctgacctctgacctccaggcccagtccaaagggaatcctgagcagacacctgttctgaaacctgaggaagaggcccctgcgcctgaggtgggcgcctctaagcctgaggggatagactcaaggcctgagacccttcatccagggagacctcagcccccagcagaggaggagctgtgcagtgggaagcccttcgacgccttcaccgacctcaagaacggttccctctttgccttccgaggtgaatccagggcaggtactggggatgcgggtctgccccaggagcgtccctgctctcacaccatctcctccactctagggcagtactgctatgaactggacgaaaaggcagtgaggcctgggtaccccaagctcatccgagatgtctggggcatcgagggccccatcgatgccgccttcacccgcatcaactgtcaggggaagacctacctcttcaaggtgccaggggctgtgggccagggtagaaagcatctagggagggtttgagagctattgctcccagggacagggtggacagggaagctggacccagggccctgcaggacctggtgggagctctgtgagcacagggcagccccaagactccaggtcctgggcagtgaacctggacctgggaacggctgccttagggcaagggactctgcctctgtgcccagccagcggcctccataccccttttcactttccccacctcttagggtagtcagtactggcgctttgaggatggtgtcctggaccctgattacccccgaaatatctctgacggcttcgatggcatcccggacaacgtggatgcagccttggccctccctgcccatagctacagtggccgggagcgggtctacttcttcaagggtactcagggggtggtgggagactgagcaggcagtggagcagtcttggattcctttcacacttcactggggacaggcctcagcatgtgcccacccctgacccccacctcatgctgggagatcctaacttcaacagcctctgggatctccagtcttgccctggcccagccctcctaatgcccaccaccccgctcctcagggaaacagtactgggagtaccagttccagcaccagcccagtcaggaggagtgtgaaggcagctccctgtcggctgtgtttgaacactttgccatgatgcagcgggacagctgggaggacatcttcgagcttctcttctggggcagaacctctggtatggagagagggcaagtcttgcttctccctcaaaagggctgaaaccccttggtattggtagagccaggccggctggagggggctgtggttgtggagctatcgatcaaagtctgtttgctcaggccagactttgcttctgttgaccttttggggaaagctcagctctacctggaccccacaccttggactttgcctagcacagctgagagcacagccagcagagggaggggctgtggctgaggagtttagggggcctgggggggtggggtcgagacaccagtgatatggtggagggaaagcacagggggaagggaattggactgagagtcaaaggcctggctctgccattcgctgctgtgtgtctttgggcaaggtgcagcagatgaactctaatggccccgctggaaggggcaagattcggacccccaagacctctcattcaccccttccctgccacagctggtaccagacagccccagttcattagccgggactggcacggtgtgccagggcaagtggacgcagccatggctggccgcatctacatctcaggcatggcaccccgcccctccttggccaagaaacaaaggtttaggcatcgcaaccgcaaaggctaccgttcacaacgaggccacagccgtggccgcaaccagaactcccgccggccatcccgcgccacgtggctgtccttgttctccagtgaggagagcaacttgggagccaacaactatgatgactacaggatggactggcttgtgcctgccacctgtgaacccatccagagtgtcttcttcttctctggaggtaggagccgctgccacccctgaagctggtctagcttgggttttccttgctgtccctggtgcacaagggctgaacgcagcctgcaagtagtgaccacagaaagccaggccagaagtccttagctgcatcatggatgttcactttcccttctgggagagaccctagacttctcaagggaagagtgggcagggccaggctgggcctcacgcatcctctgctttcctctcttccagacaagtactaccgagtcaatcttcgcacacggcgagtggacactgtggaccctccctacccacgctccatcgctcagtactggctgggctgcccagctcctggccatctgtaggagtcagagcccacatggccgggccctctgtagctccctcctcccatctccttcccccagcccaataaaggtcccttagccccgagtttaaaattattgttctgactggggtagacacatccctgtctgggtaaaggagaggaagctggactgtcagaatgggttggtgagggggacagagaagggacagagaagggcctcgccgtgtccaacccatgttgggctcaggacctctctgtgctcaggacctctctgtgaaccgaagtttggggctggggaaggcctcctgagagctacccttcctcttgagctaagcagcccccagcaacccaccagcagctaagcagacacttgaactcctctgatgatgacaaagttaccaggccagcctccgtgggtgaggcttgctttgccccttggagttgactagggtcttggaggagagagaaggggcaagagttggtggggttctggctcagcttttttgtccatcctgatctgaaatcctagtagctctgactcctgagcacttggggaaccagtcactgtgcttccccaaacccacccctagggtgagcctttcttgaggtctctgtctagggtctaggatggggagcagcaagaccaggagagatagtgaagggcagaaactgaaaggaaattcaaaagcacacacttcttgtggaaaagtggcccaggagcccaggagtttgaagctgcagtgagctattattgtaccactgcactccaacctggggaatagagtgagactctatctctaaaaacagaacaaaataaaaaagggggggaatttttgtctgggcatggtggctcatgcctgtaattccagcactttgggaagccaaggtgggaggattgctggaatcccgaagtttgagaccagcctaggcaatatagcaagacaccatctctacaaaaataaataagttagctgggcaacttatgggtggtgtgtgcctgtagtcccagctatttaggaggctgaggtgggaggattgcttgagcttgggaggttgaggctgcagtgagcagaaatcacaccactgtactccagcctgggcaacagagtgagaaaaagaaaatttaggccaggcacggtggttcatgcctgtagtcccagcactttgggaaaccaaggcgcgtggatcatgaggttaggagttcgagaccagcctggccaacatggtgaaaccccgtctctactaaaaatacaaaaaattagccgggtgtggtggcaggcgcctgtaaccccagctactccggaggaagaggcaggaggtggagttgcttgaactcgggaggtggaggttgcagtgagccaagatcacgccactgcactccagcctgggtgacaaagcaagactccatcttgaaaaaaaaagaaaaaagaaaaaaattttcaaaatttaagaaaaagtggctcagaatatatccaaggaa

SEQ ID NO: 707 - DNA, 2023 bp, Homo sapiens
caatcatggatcaatagctatgtttggagaaggaatttgtggctgctccagctactgggcattttgtctggtccagttcatgtaatctcccaacaccccatgaagcaaggctttgttaatcctattttactgaaaatgaactaagactcagagagataaagctgttgcccaatgagccttctttctgccctccagatccacggtgctaattccccttccgatgacctaatgattctgagcttggcaaaggtcttatctcccagctcgcccaggcccagtgttccaggaatgtgacctttgctgcagcagccgctggagggggcagaggggatgggctggaggttgagcaaacagagcagcagaaaaggcagttcctcttctccagtgccctccttccctgtctctgcctctccctcccttcctcaggcatcagagcggagacttcagggagaccagagcccagcttgccaggcactgagctagaagccctgccatggcacccctgagaccccttctcatactggccctgctggcatgggttgctctggctgaccaagagtcatgcaagggccgctgcactgagggcttcaacgtggacaagaagtgccagtgtgacgagctctgctcttactaccagagctgctgcacagactatacggctgagtgcaagccccaagtgactcgcggggatgtgttcactatgccggaggatgagtacacggtctatgacgatggcgaggagaaaaacaatgccactgtccatgaacaggtggggggcccctccctgacctctgacctccaggcccagtccaaagggaatcctgagcagacacctgttctgaaacctgaggaagaggcccctgcgcctgaggtgggcgcctctaagcctgaggggatagactcaaggcctgagacccttcatccagggagacctcagcccccagcagaggaggagctgtgcagtgggaagcccttcgacgccttcaccgacctcaagaacggttccctctttgccttccgagggcagtactgctatgaactggacgaaaaggcagtgaggcctgggtaccccaagctcatccgagatgtctggggcatcgagggccccatcgatgccgccttcacccgcatcaactgtcaggggaagacctacctcttcaagggtagtcagtactggcgctttgaggatggtgtcctggaccctgattacccccgaaatatctctgacggcttcgatggcatcccggacaacgtggatgcagccttggccctccctgcccatagctacagtggccgggagcgggtctacttcttcaaggggaaacagtactgggagtaccagttccagcaccagcccagtcaggaggagtgtgaaggcagctccctgtcggctgtgtttgaacactttgccatgatgcagcgggacagctgggaggacatcttcgagcttctcttctggggcagaacctctgctggtaccagacagccccagttcattagccgggactggcacggtgtgccagggcaagtggacgcagccatggctggccgcatctacatctcaggcatggcaccccgcccctccttggccaagaaacaaaggtttaggcatcgcaaccgcaaaggctaccgttcacaacgaggccacagccgtggccgcaaccagaactcccgccggccatcccgcgccatgtggctgtccttgttctccagtgaggagagcaacttgggagccaacaactatgatgactacaggatggactggcttgtgcctgccacctgtgaacccatccagagtgtcttcttcttctctggagacaagtactaccgagtcaatcttcgcacacggcgagtggacactgtggaccctccctacccacgctccatcgctcagtactggctgggctgcccagctcctggccatctgtaggagtcagagcccacatggccgggccctctgtagctccctcctcccatctccttcccccagcccaataaaggtcccttagccccgagtttaaaa

SEQ ID NO: 708 - DNA, 6039 bp, Homo sapiens
agggtcaagaacccgatagaaaggttgggggaactagtttcccaccttgttaaacacgtcccataaatgtcccttagtcgagctttttttttttttaaccgtcttttaaggtggaaacggcaaaatcctctttcagtgattcccatgtttttttttttttaattcttaattctactgggcctcttgttccaattagaacagtttccgatcgcctagttccttaaaaacctctcactacgttcagaggttgcctcttttttctggatgaatcattttcctgcactttagaggacgtacggatttcgtcactaccccctgaagaggcctttgaggctggttgcctcgttttataattaccgagagctttctctttccagcttttcacttcttcttgtagtcgcgacttggagttttgctaatgtctccctcctttcctaagtgacattgaatccgtagggatgttgatgccatcatcccctctttcccctgcaggaagtggcagtgaagctagaatctcagaaggccaggcatccccagttgctgtacgagagcaagctctataagattcttcaaggtggggttggcatcccccacatacggtggtatggtcaggaaaaagactacaatgtactagtcatggatcttctgggacctagcctcgaagacctcttcaatttctgttcaagaaggttcacaatgaaaactgtacttatgttagctgaccagatgatcagtagaattgaatatgtgcatacaaagaattttatacacagagacattaaaccagataacttcctaatgggtattgggcgtcactgtaataagttattccttattgattttggtttggccaaaaagtacagagacaacaggacaaggcaacacataccatacagagaagataaaaacctcactggcactgcccgatatgctagcatcaatgcacatcttggtattgagcagagtcgccgagatgacatggaatcattaggatatgttttgatgtattttaatagaaccagcctgccatggcaagggctaaaggctgcaacaaagaaacaaaaatatgaaaagattagtgaaaagaagatgtccacgcctgttgaagttttatgtaaggggtttcctgcagaatttgcgatgtacttaaactattgtcgtgggctacgctttgaggaagccccagattacatgtatctgaggcagctattccgcattcttttcaggaccctgaaccatcaatatgactacacatttgattggacaatgttaaagcagaaagcagcacagcaggcagcctcttccagtgggcagggtcagcaggcccaaacccccacaggcaagcaaactgacaaaaccaagagtaacatgaaaggtttctaagcatgaattgaggaacagaagaagcagagcagatgatcggagcagcatttgtttctccccaaatctagaaattttagttcatatgtacactagccagtggttgtggacaaccatttacttggtgtaaagaacttaatttcagtataaactgactctgggcagcattggtgatgctgtatcctgagttgtagcctctgtaattgtgaatattaactgagatagtgaaacatggtgtccggttttctattgcattttttcaagtggaaaagttaactaaatggttgacacacaaaaattggtggagaaattgtgcatatgccaattttttgttaaaaccttttgttttgaactatactgctttgagatctcatttcagaagaacggcatgaacagtcttcagccacagttgtgatggttgttaaatgctcacaattgtgcattcttagggtttttccatccctggggtttgcaagttgttcacttaaaacattcttaaaatggttggcttcttgtctgcaagccagctgatatggtagcaaccaaagattccagtgtttgagcatatgaaagactctgcctgcttaattgtgctagaaataacagcatctaaagtgaagacttaagaaaaacttagtgactactagattatccttaggactctgcattaactctataatgttcttggtattaaaaaaaaagcatatttgtcacagaaatttagttaacatcttacaactgaacatgtatgtatgttgcttagataaatgtaatcactgtaaacatctatatgatctgggattttgtttttattttgaaatgggagcttttttgtttacaagttcattaaaaactaaaaactgtttctgtaaggaaatgagattttttttaaacaacaaaaaatgccttgctgactcactattaaataaaaatctccccaattttttgatagactacttcaagccatttgttacatggtattcctttgcaagtcaatttaggtttcgtgttataacttttcctctttttttaagaaaaatgaaaaaagtaattcttttgtctgaaggggaaaggcattctttcatttttttctttttttttttttttttttatgacttgcaggcacaatatctagtactgcaactgccagaacttggtattgtagctgctgcccgctgactagcagctggactgattttgaataaaaatgaaagcattaaagggtttccctacaaaacatttttctttaaaatacttttgaaatggctataagcagttgactttcacccttggagagcatcacactgtgtgaggttcagtgattgttgaccctccccagcccctcctgcttctttaagttatctgtgtgcgtgcgcttcctctcaatcttctttgcacgctcatttctttttctctgacccatgagaaaggaaaacttactgatgataatttttaaatagtgtaatttattcatttatagcatgtcaggataaattaaaagaacatttgtctggaaatgctgccgggagcctattgtgtaaatgtaggtattttgtaaaataaccttgaaattgtaaattgacacgtgtttggtcagattgtgtcaagtttaatttgttttgttttcttttttcttttttttatttgaaaactactttagcaataattaattccatgattatcacattctgccattaagggatattagtaccgtaatactgaagaaattttattaagtctgaacttctggggtaggcagcttctttgtttcttttctatccacccttgtcggttgaggtatttgtttcttgactaataaaccctttgatacttttagccagaaatcagtctcataaagctatttttgagtatagtttgtgtaaaataaaaatgtttagctttggtaataacttccaagctgaactccctctagcaagatatttttcagtgcttttatttactatgcacttagactatgcactttttctgaaatatttttgtaacacttttttgtatttttgccatttgaaaaggttgtggtgtagttggtctgtaattaagttgcagatttaaaactgctgttagctttgtaaatcaaaatataggtgttttttgtcctggtatatcgtcattccatctgcagctggagctggaatcccattgatcttctagctaccattcattttcttcactgttcacaaaagaagagtgtgaaattcagtgaatgctgttactaatcctgttacgagatgaatctcatttcaccaaaattaaattatgtttttccgctaaaatgatgatacaagttgaagacacatcactctgaaattggaagacctcaccacttaaggctccacagtggcttactcagctgaactctaggttactactctttactttgttcacccattggggggtgcagtttttttaaaatgttgggagatggccattctaactactgttgaatgtctctgttttgggaaggtataacaagaaataaaaaagaatatatatgaagggagagactggttatctcctcccatatggttgtgcttatcctcttatggcttacaaatgaatatttggaggtttgctttcacaatgatttcccatcaacaaatatttttagtaggatttttcctgtttctgttagtccttgcagtactcataaatgttttaagctgagcatactgtaatagtcataagtttaatttcattataataaaaataatcaaacaaaaggactttagaacccaagacaatgagctagttttccctaaagtttgctgaactattaaggaatatgttcttatagcttttgactagaatgagtcatgggaattctaagaagggatggcctagacatttttagctcagttaaattcagcatttaatgcaggtgagttcctgggtcgttttccaactagtctggaacagtctggttctgactcaaactggtataaagcattattttaggttttctctttgccagtttttaagcagttataaccatgtaaatcaagatgtgaggacatctatatgaagtatagtaaagaagtggtgtcagcagatcaatatgtgtgtcctgggtgtgctgctctcttaagtgagactttgtgagactatactttaaatgcattattaccattgcttacattttgggggattttcttcctcctcaaaacttccatttctattgtaatattcttaatgacaatctttttttttttttagcagtgtatgtttgaaacagccaaagatggcgatgaaccaagtgtaaattgatctaagcagcccatgcagtttgtgttgaatcaacaaacagtgtattgttgaagtgaaattattttctgaaatgacttgttagaccagttttgaggacatactcaaaagtagagtaataatggctcctgggatggagaaatatgagatgaacctggaacattctattatggtgccacaaaggaaatctaaaaaaaaaaaaaaaaaaaaaagtggttggctaggagcagtggcacacgcctgtgattccagcactttgggaggccgaagtgggcaggagttcaagaccagcctggccaacatagtgaaaccctgtctctactaaaaatacaaaaattagccgggtgtggtggcgggcgcctgtaatcccagcttttcaagaggctgaggcagaagaatcgcttgaacccgggagatggaggttgcagtgagctgagatcgtgccactgcactccagcctgggcgttgcagtgagactccgtctcaacaacaacaaaaaggtggatacatgtcaaaagggcacaggagccacttgaaggattatacttgctaaatctgtgtcaattatcaaaataaactggtagcaacgttacaactcactgaataagataccatgattccatgttgacttaaaaatggagagaagagaaagctctaacttgaatgtcagctaatttaaggtgaaaggattttatgtgttagaaaaatcaccattttgcaaactagttttcagaatccttaatatatgtcatctcttttattcctcataacagtaataagaaacagttaactgtttcagaaaagagtggggctgcccaaggcaaggcatgttggtaattggtaagctttatagagccaagacctcaacctgattttcttgctttcatgcagttaagccatggtgctcctcttgttatatcacccttttaaacccagagattgatagtattagccatcatttgctgagtgtcatgcactattctaagtgctttacatgtatttgcctaatcagcgccctgtgaagtacatcctgtctccattttgcatataaggataccaaagcacagagttggagggaagatagttatattcccttactttatttatttatttttttgagacagggtctcgcactgtcgcccaggcttgagtgctataagaccttaagtttcccctttcaaagtagtttatagtgtctaaatatcttacataaaagtatatatcaaatagggtggcagtctggaaagatttaaaatccagaatgactggaaggttgggcaactaagatttcttaaattgcagctgttttcaacatagatgtgttgtagagtcttttcggtttcaaaattaaattgactataaatggagtgtgcttaa

SEQ ID NO: 709 - DNA, 7886 bp, Homo sapiens
ccccatccccaccgcctccaggctgccggggctgggccgctgtacgggagccaaggtgcggtgccccgcgtgtggacgagccgaggtgcagcccgcggggccgcagggccggggtggggcggggcgcggcgggagcagatccggtgtttgcggaatcaggaggggcgggccggggcgggccctcggcgctgcaggagctgcccagaaacttttccctgctctcaccgggcgggggagagaagccctctggacagcttctagagtgtgcaggttctcgtatccctcggccaagggtatcctctgcaaacctctgcaaacccagcgcaactacggtcccccggtcagacccaggatggggccagaacggacaggggccgcgccgctgccgctgctgctggtgttagcgctcagtcaaggcattttaaattgttgtttggcctacaatgttggtctcccagaagcaaaaatattttccggtccttcaagtgaacagtttggctatgcagtgcagcagtttataaatccaaaaggcaactggttactggttggttcaccctggagtggctttcctgagaaccgaatgggagatgtgtataaatgtcctgttgacctatccactgccacatgtgaaaaactaaatttgcaaacttcaacaagcattccaaatgttactgagatgaaaaccaacatgagcctcggcttgatcctcaccaggaacatgggaactggaggttttctcacatgtggtcctctgtgggcacagcaatgtgggaatcagtattacacaacgggtgtgtgttctgacatcagtcctgattttcagctctcagccagcttctcacctgcaactcagccctgcccttccctcatagatgttgtggttgtgtgtgatgaatcaaatagtatttatccttgggatgcagtaaagaattttttggaaaaatttgtacaaggcctggatataggccccacaaagacacaggtggggttaattcagtatgccaataatccaagagttgtgtttaacttgaacacatataaaaccaaagaagaaatgattgtagcaacatcccagacatcccaatatggtggggacctcacaaacacattcggagcaattcaatatgcaagaaaatatgcttattcagcagcttctggtgggcgacgaagtgctacgaaagtaatggtagttgtaactgacggtgaatcacatgatggttcaatgttgaaagctgtgattgatcaatgcaaccatgacaatatactgaggtttggcatagcagttcttgggtacttaaacagaaacgcccttgatactaaaaatttaataaaagaaataaaagcaatcgctagtattccaacagaaagatactttttcaatgtgtctgatgaagcagctctactagaaaaggctgggacattaggagaacaaattttcagcattgaaggtactgttcaaggaggagacaactttcagatggaaatgtcacaagtgggattcagtgcagattactcttctcaaaatgatattctgatgctgggtgcagtgggagcttttggctggagtgggaccattgtccagaagacatctcatggccatttgatctttcctaaacaagcctttgaccaaattctgcaggacagaaatcacagttcatatttaggttactctgtggctgcaatttctactggagaaagcactcactttgttgctggtgctcctcgggcaaattataccggccagatagtgctatatagtgtgaatgagaatggcaatatcacggttattcaggctcaccgaggtgaccagattggctcctattttggtagtgtgctgtgttcagttgatgtggataaagacaccattacagacgtgctcttggtaggtgcaccaatgtacatgagtgacctaaagaaagaggaaggaagagtctacctgtttactatcaaagagggcattttgggtcagcaccaatttcttgaaggccccgagggcattgaaaacactcgatttggttcagcaattgcagctctttcagacatcaacatggatggctttaatgatgtgattgttggttcaccactagaaaatcagaattctggagctgtatacatttacaatggtcatcagggcactatccgcacaaagtattcccagaaaatcttgggatccgatggagcctttaggagccatctccagtactttgggaggtccttggatggctatggagatttaaatggggattccatcaccgatgtgtctattggtgcctttggacaagtggttcaactctggtcacaaagtattgctgatgtagctatagaagcttcattcacaccagaaaaaatcactttggtcaacaagaatgctcagataattctcaaactctgcttcagtgcaaagttcagacctactaagcaaaacaatcaagtggccattgtatataacatcacacttgatgcagatggattttcatccagagtaacctccagggggttatttaaagaaaacaatgaaaggtgcctgcagaagaatatggtagtaaatcaagcacagagttgccccgagcacatcatttatatacaggagccctctgatgttgtcaactctttggatttgcgtgtggacatcagtctggaaaaccctggcactagccctgcccttgaagcctattctgagactgccaaggtcttcagtattcctttccacaaagactgtggtgaggacggactttgcatttctgatctagtcctagatgtccgacaaataccagctgctcaagaacaaccctttattgtcagcaaccaaaacaaaaggttaacattttcagtaacgctgaaaaataaaagggaaagtgcatacaacactggaattgttgttgatttttcagaaaacttgttttttgcatcattctccctgccggttgatgggacagaagtaacatgccaggtggctgcatctcagaagtctgttgcctgcgatgtaggctaccctgctttaaagagagaacaacaggtgacttttactattaactttgacttcaatcttcaaaaccttcagaatcaggcgtctctcagtttccaagccttaagtgaaagccaagaagaaaacaaggctgataatttggtcaacctcaaaattcctctcctgtatgatgctgaaattcacttaacaagatctaccaacataaatttttatgaaatctcttcggatgggaatgttccttcaatcgtgcacagttttgaagatgttggtccaaaattcatcttctccctgaaggtaacaacaggaagtgttccagtaagcatggcaactgtaatcatccacatccctcagtataccaaagaaaagaacccactgatgtacctaactggggtgcaaacagacaaggctggtgacatcagttgtaatgcagatatcaatccactgaaaataggacaaacatcttcttctgtatctttcaaaagtgaaaatttcaggcacaccaaagaattgaactgcagaactgcttcctgtagtaatgttacctgctggttgaaagacgttcacatgaaaggagaatactttgttaatgtgactaccagaatttggaacgggactttcgcatcatcaacgttccagacagtacagctaacggcagctgcagaaatcaacacctataaccctgagatatatgtgattgaagataacactgttacgattcccctgatgataatgaaacctgatgagaaagccgaagtaccaacaggagttataataggaagtataattgctggaatccttttgctgttagctctggttgcaattttatggaagctcggcttcttcaaaagaaaatatgaaaagatgaccaaaaatccagatgagattgatgagaccacagagctcagtagctgaaccagcagacctacctgcagtgggaaccggcagcatcccagccagggtttgctgtttgcgtgaatggatttctttttaaatcccatattttttttatcatgtcgtaggtaaactaacctggtattttaagagaaaactgcaggtcagtttggaatgaagaaattgtggggggtgggggaggtgcggggggcaggtagggaaataatagggaaaatacctattttatatgatgggggaaaaaaagtaatctttaaactggctggcccagagtttacattctaatttgcattgtgtcagaaacatgaaatgcttccaagcatgacaacttttaaagaaaaatatgatactctcagattttaagggggaaaactgttctctttaaaatatttgtctttaaacagcaactacagaagtggaagtgcttgatatgtaagtacttccacttgtgtatattttaatgaatattgatgttaacaagaggggaaaacaaaacacaggttttttcaatttatgctgctcatccaaagttgccacagatgatacttccaagtgataattttatttataaactaggtaaaatttgttgttggttccttttagaccacggctgccccttccacaccccatcttgctctaatgatcaaaacatgcttgaataactgagcttagagtatacctcctatatgtccatttaagttaggagagggggcgatatagagactaaggcacaaaattttgtttaaaactcagaatataacatgtaaaatcccatctgctagaagcccatcctgtgccagaggaaggaaaaggaggaaatttcctttctcttttaggaggcacaacagttctcttctaggatttgtttggctgactggcagtaacctagtgaatttctgaaagatgagtaatttctttggcaaccttcctcctcccttactgaaccactctcccacctcctggtggtaccattattatagaagccctctacagcctgactttctctccagcggtccaaagttatcccctcctttacccctcatccaaagttcccactccttcaggacagctgctgtgcattagatattaggggggaaagtcatctgtttaatttacacacttgcatgaattactgtatataaactccttaacttcagggagctattttcatttagtgctaaacaagtaagaaaaataagctcgagtgaatttctaaatgttggaatgttatgggatgtaaacaatgtaaagtaagacatctcaggatttcaccagaagttacagatgaggcactggaagccaccaaattagcaggtgcaccttctgtggctgtcttgtttctgaagtacttaaacttccacaagagtgaatttgacctaggcaagtttgttcaaaaggtagatcctgagatgatttggtcagattgggataaggcccagcaatctgcattttaacaagcaccccagtcactaggatgcagatggaccacactttgagaaacaccacccatttctactttttgcaccttattttctctgttcctgagcccccacattctctaggagaaacttagaggaaaagggcacagacactacatatctaaagctttggacaagtccttgacctctataaacttcagagtcctcattataaaatgggaagactgagctggagttcagcagtgatgcttttagttttaaaagtctatgatctggacttcctataatacaaatacacaatcctccaagaatttgacttggaaaaaaatgtcaaaggaaaacaggttatctgcccatgtgcatatggacaaccttgactaccctggcctggcccgtggtggcagtccagggctatctgtactgtttacagaattactttgtagttgacaacacaaaacaaacaaaaaaggcataaaatgccagcggtttatagaaaaaacagcatggtattctccagttaggtatgccagagtccaattcttttaacagctgtgagaatttgctgcttcattccaacaaaattttatttaaaaaaaaaaaaaaaagactggagaaactagtcattagcttgataaagaatatttaacagctagtggtgctggtgtgtacctgaagctccagctacttgagagactgagacaggaagatcgcttgagcccaggagttcaagtccagcctaagcaacatagcaagaccctgtctcaaaaaaatgactatttaaaaagacaatgtggccaggcacggtggctcacacctgtaatcccaacactttgggaggctgaggccggtggatcacgaggtcaggagtttgagactagcctggccaacatggtgaaaccccatctctaataatataaaaattagctgggcgtagtagcaggtgcctgtaatcccagttactcgggaagctgaggcaggagaatcacttgaacccgggaggcagaggtttcagtgagccgagatcgcgccactgcactccagcctgggtgacagggcaagactctgtctcaaacaaacaaacaaaaaaaaagttagtactgtatatgtaaatactagcttttcaatgtgctatacaaacaattatagcacatccttccttttactctgtctcacctcctttaggtgagtacttccttaaataagtgctaaacatacatatacggaacttgaaagctttggttagccttgccttaggtaatcagcctagtttacactgtttccagggagtagttgaattactataaaccattagccacttgtctctgcaccatttatcacaccaggacagggtctctcaacctgggcgctactgtcatttggggccaggtgattcttccttgcaggggctgtcctgtaccttgtaggacagcagccctgtcctagaaggtatgtttagcagcattcctggcctctagctacccgatgccagagcatgctccccccgcagtcatgacaatcaaaaaatgtctccagacattgtcaaatgcctcctggggggcagtatttctcaagcacttttaagcaaaggtaagtattcatacaagaaatttagggggaaaaaacattgtttaaataaaagctatgtgttcctattcaacaatatttttgctttaaaagtaagtagagggcataaaagatgtcatattcaaatttccatttcataaatggtgtacagacaaggtctatagaatgtggtaaaaacttgactgcaacacaaggcttataaaatagtaagatagtaaaatagcttatgaagaaactacagagatttaaaattgtgcatgactcatttcagcagcaaaataagaactcctaactgaacagaaatttttctacctagcaatgttattcttgtaaaatagttacctattaaaactgtgaagagtaaaactaaagccaatttattatagtcacacaagtgattatactaaaaattattataaaggttataattttataatgtatttacctgtcctgatatatagctataacccaatatatgaaaatctcaaaaattaagacatcatcatacagaaggcaggattccttaaactgagatccctgatccatctttaatatttcaatttgcacacataaaacaatgcccttttgtgtacattcaggcatacccattttaatcaatttgaaaggttaatttaaacctctagaggtgaatgagaaacatgggggaaaagtatgaaataggtgaaaatcttaactatttctttgaactctaaagactgaaactgtagccattatgtaaataaagtttcatatgtacctgtttattttggcagattaagtcaaaatatgaatgtatatattgcataactatgttagaattgtatatattttaaagaaattgtcttggatattttcctttatacataatagataagtcttttttcaaatgtggtgtttgatgtttttgattaaatgtgttttgcctctttccacaaaaactgtaaaaataaatgcatgtttgtacaaaa

SEQ ID NO: 710 - DNA, 6256 bp, Homo sapiens
ttcggagcgagcgcccgagatccctttcccagagtgctctgcgccgtgaagaagcggctcccggggactgggggcattttgtgttggctggagctggagtaacaagatggcgtcgtccgcggagtgacaggggtccctctgggccggagccggcggcagtggtggcagcggtatcgccgccctagctcaccgcgccccttttccagcccgcgacgtcgccgcgcaagcgaggcagcggcggccgccgagaaacaagtggcccagcctggtaaccgccgagaagcccttcacaaactgcggcctggcaaaaagaaacctgactgagcggcggtgatcaggttcccctctgctgattctgggccccgaaccccggtaaaggcctccgtgttccgtttcctgccgccctcctccgtagccttgcctagtgtaggagccccgaggcctccgtcctcttcccagaggtgtcggggcttggccccagcctccatcttcgtctctcaggatggcgagtagcagcggctccaaggctgaattcattgtcggagggaaatataaactggtacggaagatcgggtctggctccttcggggacatctatttggcgatcaacatcaccaacggcgaggaagtggcagtgaagctagaatctcagaaggccaggcatccccagttgctgtacgagagcaagctctataagattcttcaaggtggggttggcatcccccacatacggtggtatggtcaggaaaaagactacaatgtactagtcatggatcttctgggacctagcctcgaagacctcttcaatttctgttcaagaaggttcacaatgaaaactgtacttatgttagctgaccagatgatcagtagaattgaatatgtgcatacaaagaattttatacacagagacattaaaccagataacttcctaatgggtattgggcgtcactgtaataagtgtttagaatctccagtggggaagaggaaaagaagcatgactgttagtacttctcaggacccatctttctcaggattaaaccagttattccttattgattttggtttggccaaaaagtacagagacaacaggacaaggcaacacataccatacagagaagataaaaacctcactggcactgcccgatatgctagcatcaatgcacatcttggtattgagcagagtcgccgagatgacatggaatcattaggatatgttttgatgtattttaatagaaccagcctgccatggcaagggctaaaggctgcaacaaagaaacaaaaatatgaaaagattagtgaaaagaagatgtccacgcctgttgaagttttatgtaaggggtttcctgcagaatttgcgatgtacttaaactattgtcgtgggctacgctttgaggaagccccagattacatgtatctgaggcagctattccgcattcttttcaggaccctgaaccatcaatatgactacacatttgattggacaatgttaaagcagaaagcagcacagcaggcagcctcttccagtgggcagggtcagcaggcccaaacccccacaggcaagcaaactgacaaaaccaagagtaacatgaaaggtttctaagcatgaattgaggaacagaagaagcagagcagatgatcggagcagcatttgtttctccccaaatctagaaattttagttcatatgtacactagccagtggttgtggacaaccatttacttggtgtaaagaacttaatttcagtataaactgactctgggcagcattggtgatgctgtatcctgagttgtagcctctgtaattgtgaatattaactgagatagtgaaacatggtgtccggttttctattgcattttttcaagtggaaaagttaactaaatggttgacacacaaaaattggtggagaaattgtgcatatgccaattttttgttaaaaccttttgttttgaactatactgctttgagatctcatttcagaagaacggcatgaacagtcttcagccacagttgtgatggttgttaaatgctcacaattgtgcattcttagggtttttccatccctggggtttgcaagttgttcacttaaaacattcttaaaatggttggcttcttgtctgcaagccagctgatatggtagcaaccaaagattccagtgtttgagcatatgaaagactctgcctgcttaattgtgctagaaataacagcatctaaagtgaagacttaagaaaaacttagtgactactagattatccttaggactctgcattaactctataatgttcttggtattaaaaaaaaagcatatttgtcacagaaatttagttaacatcttacaactgaacatgtatgtatgttgcttagataaatgtaatcactgtaaacatctatatgatctgggattttgtttttattttgaaatgggagcttttttgtttacaagttcattaaaaactaaaaactgtttctgtaaggaaatgagattttttttaaacaacaaaaaatgccttgctgactcactattaaataaaaatctccccaattttttgatagactacttcaagccatttgttacatggtattcctttgcaagtcaatttaggtttcgtgttataacttttcctctttttttaagaaaaatgaaaaaagtaattcttttgtctgaaggggaaaggcattctttcatttttttctttttttttttttttttttatgacttgcaggcacaatatctagtactgcaactgccagaacttggtattgtagctgctgcccgctgactagcagctggactgattttgaataaaaatgaaagcattaaagggtttccctacaaaacatttttctttaaaatacttttgaaatggctataagcagttgactttcacccttggagagcatcacactgtgtgaggttcagtgattgttgaccctccccagcccctcctgcttctttaagttatctgtgtgcgtgcgcttcctctcaatcttctttgcacgctcatttctttttctctgacccatgagaaaggaaaacttactgatgataatttttaaatagtgtaatttattcatttatagcatgtcaggataaattaaaagaacatttgtctggaaatgctgccgggagcctattgtgtaaatgtaggtattttgtaaaataaccttgaaattgtaaattgacacgtgtttggtcagattgtgtcaagtttaatttgttttgttttcttttttcttttttttatttgaaaactactttagcaataattaattccatgattatcacattctgccattaagggatattagtaccgtaatactgaagaaattttattaagtctgaacttctggggtaggcagcttctttgtttcttttctatccacccttgtcggttgaggtatttgtttcttgactaataaaccctttgatacttttagccagaaatcagtctcataaagctatttttgagtatagtttgtgtaaaataaaaatgtttagctttggtaataacttccaagctgaactccctctagcaagatatttttcagtgcttttatttactatgcacttagactatgcactttttctgaaatatttttgtaacacttttttgtatttttgccatttgaaaaggttgtggtgtagttggtctgtaattaagttgcagatttaaaactgctgttagctttgtaaatcaaaatataggtgttttttgtcctggtatatcgtcattccatctgcagctggagctggaatcccattgatcttctagctaccattcattttcttcactgttcacaaaagaagagtgtgaaattcagtgaatgctgttactaatcctgttacgagatgaatctcatttcaccaaaattaaattatgtttttccgctaaaatgatgatacaagttgaagacacatcactctgaaattggaagacctcaccacttaaggctccacagtggcttactcagctgaactctaggttactactctttactttgttcacccattggggggtgcagtttttttaaaatgttgggagatggccattctaactactgttgaatgtctctgttttgggaaggtataacaagaaataaaaaagaatatatatgaagggagagactggttatctcctcccatatggttgtgcttatcctcttatggcttacaaatgaatatttggaggtttgctttcacaatgatttcccatcaacaaatatttttagtaggatttttcctgtttctgttagtccttgcagtactcataaatgttttaagctgagcatactgtaatagtcataagtttaatttcattataataaaaataatcaaacaaaaggactttagaacccaagacaatgagctagttttccctaaagtttgctgaactattaaggaatatgttcttatagcttttgactagaatgagtcatgggaattctaagaagggatggcctagacatttttagctcagttaaattcagcatttaatgcaggtgagttcctgggtcgttttccaactagtctggaacagtctggttctgactcaaactggtataaagcattattttaggttttctctttgccagtttttaagcagttataaccatgtaaatcaagatgtgaggacatctatatgaagtatagtaaagaagtggtgtcagcagatcaatatgtgtgtcctgggtgtgctgctctcttaagtgagactttgtgagactatactttaaatgcattattaccattgcttacattttgggggattttcttcctcctcaaaacttccatttctattgtaatattcttaatgacaatctttttttttttttagcagtgtatgtttgaaacagccaaagatggcgatgaaccaagtgtaaattgatctaagcagcccatgcagtttgtgttgaatcaacaaacagtgtattgttgaagtgaaattattttctgaaatgacttgttagaccagttttgaggacatactcaaaagtagagtaataatggctcctgggatggagaaatatgagatgaacctggaacattctattatggtgccacaaaggaaatctaaaaaaaaaaaaaaaaaaaaaagtggttggctaggagcagtggcacacgcctgtgattccagcactttgggaggccgaagtgggcaggagttcaagaccagcctggccaacatagtgaaaccctgtctctactaaaaatacaaaaattagccgggtgtggtggcgggcgcctgtaatcccagcttttcaagaggctgaggcagaagaatcgcttgaacccgggagatggaggttgcagtgagctgagatcgtgccactgcactccagcctgggcgttgcagtgagactccgtctcaacaacaacaaaaaggtggatacatgtcaaaagggcacaggagccacttgaaggattatacttgctaaatctgtgtcaattatcaaaataaactggtagcaacgttacaactcactgaataagataccatgattccatgttgacttaaaaatggagagaagagaaagctctaacttgaatgtcagctaatttaaggtgaaaggattttatgtgttagaaaaatcaccattttgcaaactagttttcagaatccttaatatatgtcatctcttttattcctcataacagtaataagaaacagttaactgtttcagaaaagagtggggctgcccaaggcaaggcatgttggtaattggtaagctttatagagccaagacctcaacctgattttcttgctttcatgcagttaagccatggtgctcctcttgttatatcacccttttaaacccagagattgatagtattagccatcatttgctgagtgtcatgcactattctaagtgctttacatgtatttgcctaatcagcgccctgtgaagtacatcctgtctccattttgcatataaggataccaaagcacagagttggagggaagatagttatattcccttactttatttatttatttttttgagacagggtctcgcactgtcgcccaggcttgagtgctataagaccttaagtttcccctttcaaagtagtttatagtgtctaaatatcttacataaaagtatatatcaaatagggtggcagtctggaaagatttaaaatccagaatgactggaaggttgggcaactaagatttcttaaattgcagctgttttcaacatagatgtgttgtagagtcttttcggtttcaaaattaaattgactataaatggagtgtgcttaa

SEQ ID NO: 711 - DNA, 4425 bp, Homo sapiens
ttcggagcgagcgcccgagatccctttcccagagtgctctgcgccgtgaagaagcggctcccggggactgggggcattttgtgttggctggagctggagtaacaagatggcgtcgtccgcggagtgacaggggtccctctgggccggagccggcggcagtggtggcagcggtatcgccgccctagctcaccgcgccccttttccagcccgcgacgtcgccgcgcaagcgaggcagcggcggccgccgagaaacaagtggcccagcctggtaaccgccgagaagcccttcacaaactgcggcctggcaaaaagaaacctgactgagcggcggtgatcaggttcccctctgctgattctgggccccgaaccccggtaaaggcctccgtgttccgtttcctgccgccctcctccgtagccttgcctagtgtaggagccccgaggcctccgtcctcttcccagaggtgtcggggcttggccccagcctccatcttcgtctctcaggatggcgagtagcagcggctccaaggctgaattcattgtcggagggaaatataaactggtacggaagatcgggtctggctccttcggggacatctatttggcgatcaacatcaccaacggcgaggaagtggcagtgaagctagaatctcagaaggccaggcatccccagttgctgtacgagagcaagctctataagattcttcaaggtggggttggcatcccccacatacggtggtatggtcaggaaaaagactacaatgtactagtcatggatcttctgggacctagcctcgaagacctcttcaatttctgttcaagaaggttcacaatgaaaactgtacttatgttagctgaccagatgatcagtagaattgaatatgtgcatacaaagaattttatacacagagacattaaaccagataacttcctaatgggtattgggcgtcactgtaataagtgtttagaatctccagtggggaagaggaaaagaagcatgactgttagtacttctcaggacccatctttctcaggattaaaccagttattccttattgattttggtttggccaaaaagtacagagacaacaggacaaggcaacacataccatacagagaagataaaaacctcactggcactgcccgatatgctagcatcaatgcacatcttggtattgagcagagtcgccgagatgacatggaatcattaggatatgttttgatgtattttaatagaaccagcctgccatggcaagggctaaaggctgcaacaaagaaacaaaaatatgaaaagattagtgaaaagaagatgtccacgcctgttgaagttttatgtaaggggtttcctgcagaatttgcgatgtacttaaactattgtcgtgggctacgctttgaggaagccccagattacatgtatctgaggcagctattccgcattcttttcaggaccctgaaccatcaatatgactacacatttgattggacaatgttaaagcagaaagcagcacagcaggcagcctcttccagtgggcagggtcagcaggcccaaacccccacaggtttctaagcatgaattgaggaacagaagaagcagagcagatgatcggagcagcatttgtttctccccaaatctagaaattttagttcatatgtacactagccagtggttgtggacaaccatttacttggtgtaaagaacttaatttcagtataaactgactctgggcagcattggtgatgctgtatcctgagttgtagcctctgtaattgtgaatattaactgagatagtgaaacatggtgtccggttttctattgcattttttcaagtggaaaagttaactaaatggttgacacacaaaaattggtggagaaattgtgcatatgccaattttttgttaaaaccttttgttttgaactatactgctttgagatctcatttcagaagaacggcatgaacagtcttcagccacagttgtgatggttgttaaatgctcacaattgtgcattcttagggtttttccatccctggggtttgcaagttgttcacttaaaacattcttaaaatggttggcttcttgtctgcaagccagctgatatggtagcaaccaaagattccagtgtttgagcatatgaaagactctgcctgcttaattgtgctagaaataacagcatctaaagtgaagacttaagaaaaacttagtgactactagattatccttaggactctgcattaactctataatgttcttggtattaaaaaaaaagcatatttgtcacagaaatttagttaacatcttacaactgaacatgtatgtatgttgcttagataaatgtaatcactgtaaacatctatatgatctgggattttgtttttattttgaaatgggagcttttttgtttacaagttcattaaaaactaaaaactgtttctgtaaggaaatgagattttttttaaacaacaaaaaatgccttgctgactcactattaaataaaaatctccccaattttttgatagactacttcaagccatttgttacatggtattcctttgcaagtcaatttaggtttcgtgttataacttttcctctttttttaagaaaaatgaaaaaagtaattcttttgtctgaaggggaaaggcattctttcatttttttctttttttttttttttttttatgacttgcaggcacaatatctagtactgcaactgccagaacttggtattgtagctgctgcccgctgactagcagctggactgattttgaataaaaatgaaagcattaaagggtttccctacaaaacatttttctttaaaatacttttgaaatggctataagcagttgactttcacccttggagagcatcacactgtgtgaggttcagtgattgttgaccctccccagcccctcctgcttctttaagttatctgtgtgcgtgcgcttcctctcaatcttctttgcacgctcatttctttttctctgacccatgagaaaggaaaacttactgatgataatttttaaatagtgtaatttattcatttatagcatgtcaggataaattaaaagaacatttgtctggaaatgctgccgggagcctattgtgtaaatgtaggtattttgtaaaataaccttgaaattgtaaattgacacgtgtttggtcagattgtgtcaagtttaatttgttttgttttcttttttcttttttttatttgaaaactactttagcaataattaattccatgattatcacattctgccattaagggatattagtaccgtaatactgaagaaattttattaagtctgaacttctggggtaggcagcttctttgtttcttttctatccacccttgtcggttgaggtatttgtttcttgactaataaaccctttgatacttttagccagaaatcagtctcataaagctatttttgagtatagtttgtgtaaaataaaaatgtttagctttggtaataacttccaagctgaactccctctagcaagatatttttcagtgcttttatttactatgcacttagactatgcactttttctgaaatatttttgtaacacttttttgtatttttgccatttgaaaaggttgtggtgtagttggtctgtaattaagttgcagatttaaaactgctgttagctttgtaaatcaaaatataggtgttttttgtcctggtatatcgtcattccatctgcagctggagctggaatcccattgatcttctagctaccattcattttcttcactgttcacaaaagaagagtgtgaaattcagtgaatgctgttactaatcctgttacgagatgaatctcatttcaccaaaattaaattatgtttttccgctaaaatgatgatacaagttgaagacacatcactctgaaattggaagacctcaccacttaaggctccacagtggcttactcagctgaactctagcagtgtatgtttgaaacagccaaagatggcgatgaaccaagtgtaaattgatctaagcagcccatgcagtttgtgttgaatcaacaaacagtgtattgttgaagtgaaattattttctgaaatgacttgttagaccagttttgaggacatactcaaaagtagagtaataatggctcctgggatggagaaatatgagatgaacctggaacattctattatggtgccacaaaggaaatctaaaaaaaaaaaaaaaaaaaaaagtggttggctaggagcagtggcacacgcctgtgattccagcactttgggaggccgaagtgggcaggagttcaagaccagcctggccaacatagtgaaaccctgtctctactaaaaatacaaaaattagccgggtgtggtggcgggcgcctgtaatcccagcttttcaagaggctgaggcagaagaatcgcttgaacccgggagatggaggttgcagtgagct

SEQ ID NO: 712 - DNA, 6140 bp, Homo sapiens
ttcggagcgagcgcccgagatccctttcccagagtgctctgcgccgtgaagaagcggctcccggggactgggggcattttgtgttggctggagctggagtaacaagatggcgtcgtccgcggagtgacaggggtccctctgggccggagccggcggcagtggtggcagcggtatcgccgccctagctcaccgcgccccttttccagcccgcgacgtcgccgcgcaagcgaggcagcggcggccgccgagaaacaagtggcccagcctggtaaccgccgagaagcccttcacaaactgcggcctggcaaaaagaaacctgactgagcggcggtgatcaggttcccctctgctgattctgggccccgaaccccggtaaaggcctccgtgttccgtttcctgccgccctcctccgtagccttgcctagtgtaggagccccgaggcctccgtcctcttcccagaggtgtcggggcttggccccagcctccatcttcgtctctcaggatggcgagtagcagcggctccaaggctgaattcattgtcggagggaaatataaactggtacggaagatcgggtctggctccttcggggacatctatttggcgatcaacatcaccaacggcgaggaagtggcagtgaagctagaatctcagaaggccaggcatccccagttgctgtacgagagcaagctctataagattcttcaaggtggggttggcatcccccacatacggtggtatggtcaggaaaaagactacaatgtactagtcatggatcttctgggacctagcctcgaagacctcttcaatttctgttcaagaaggttcacaatgaaaactgtacttatgttagctgaccaggtatatgatcagtagaattgaatatgtgcatacaaagaattttatacacagagacattaaaccagataacttcctaatgggtattgggcgtcactgtaataagttattccttattgattttggtttggccaaaaagtacagagacaacaggacaaggcaacacataccatacagagaagataaaaacctcactggcactgcccgatatgctagcatcaatgcacatcttggtattgagcagagtcgccgagatgacatggaatcattaggatatgttttgatgtattttaatagaaccagcctgccatggcaagggctaaaggctgcaacaaagaaacaaaaatatgaaaagattagtgaaaagaagatgtccacgcctgttgaagttttatgtaaggggtttcctgcagaatttgcgatgtacttaaactattgtcgtgggctacgctttgaggaagccccagattacatgtatctgaggcagctattccgcattcttttcaggaccctgaaccatcaatatgactacacatttgattggacaatgttaaagcagaaagcagcacagcaggcagcctcttccagtgggcagggtcagcaggcccaaacccccacaggtttctaagcatgaattgaggaacagaagaagcagagcagatgatcggagcagcatttgtttctccccaaatctagaaattttagttcatatgtacactagccagtggttgtggacaaccatttacttggtgtaaagaacttaatttcagtataaactgactctgggcagcattggtgatgctgtatcctgagttgtagcctctgtaattgtgaatattaactgagatagtgaaacatggtgtccggttttctattgcattttttcaagtggaaaagttaactaaatggttgacacacaaaaattggtggagaaattgtgcatatgccaattttttgttaaaaccttttgttttgaactatactgctttgagatctcatttcagaagaacggcatgaacagtcttcagccacagttgtgatggttgttaaatgctcacaattgtgcattcttagggtttttccatccctggggtttgcaagttgttcacttaaaacattcttaaaatggttggcttcttgtctgcaagccagctgatatggtagcaaccaaagattccagtgtttgagcatatgaaagactctgcctgcttaattgtgctagaaataacagcatctaaagtgaagacttaagaaaaacttagtgactactagattatccttaggactctgcattaactctataatgttcttggtattaaaaaaaaagcatatttgtcacagaaatttagttaacatcttacaactgaacatgtatgtatgttgcttagataaatgtaatcactgtaaacatctatatgatctgggattttgtttttattttgaaatgggagcttttttgtttacaagttcattaaaaactaaaaactgtttctgtaaggaaatgagattttttttaaacaacaaaaaatgccttgctgactcactattaaataaaaatctccccaattttttgatagactacttcaagccatttgttacatggtattcctttgcaagtcaatttaggtttcgtgttataacttttcctctttttttaagaaaaatgaaaaaagtaattcttttgtctgaaggggaaaggcattctttcatttttttctttttttttttttttttttatgacttgcaggcacaatatctagtactgcaactgccagaacttggtattgtagctgctgcccgctgactagcagctggactgattttgaataaaaatgaaagcattaaagggtttccctacaaaacatttttctttaaaatacttttgaaatggctataagcagttgactttcacccttggagagcatcacactgtgtgaggttcagtgattgttgaccctccccagcccctcctgcttctttaagttatctgtgtgcgtgcgcttcctctcaatcttctttgcacgctcatttctttttctctgacccatgagaaaggaaaacttactgatgataatttttaaatagtgtaatttattcatttatagcatgtcaggataaattaaaagaacatttgtctggaaatgctgccgggagcctattgtgtaaatgtaggtattttgtaaaataaccttgaaattgtaaattgacacgtgtttggtcagattgtgtcaagtttaatttgttttgttttcttttttcttttttttatttgaaaactactttagcaataattaattccatgattatcacattctgccattaagggatattagtaccgtaatactgaagaaattttattaagtctgaacttctggggtaggcagcttctttgtttcttttctatccacccttgtcggttgaggtatttgtttcttgactaataaaccctttgatacttttagccagaaatcagtctcataaagctatttttgagtatagtttgtgtaaaataaaaatgtttagctttggtaataacttccaagctgaactccctctagcaagatatttttcagtgcttttatttactatgcacttagactatgcactttttctgaaatatttttgtaacacttttttgtatttttgccatttgaaaaggttgtggtgtagttggtctgtaattaagttgcagatttaaaactgctgttagctttgtaaatcaaaatataggtgttttttgtcctggtatatcgtcattccatctgcagctggagctggaatcccattgatcttctagctaccattcattttcttcactgttcacaaaagaagagtgtgaaattcagtgaatgctgttactaatcctgttacgagatgaatctcatttcaccaaaattaaattatgtttttccgctaaaatgatgatacaagttgaagacacatcactctgaaattggaagacctcaccacttaaggctccacagtggcttactcagctgaactctaggttactactctttactttgttcacccattggggggtgcagtttttttaaaatgttgggagatggccattctaactactgttgaatgtctctgttttgggaaggtataacaagaaataaaaaagaatatatatgaagggagagactggttatctcctcccatatggttgtgcttatcctcttatggcttacaaatgaatatttggaggtttgctttcacaatgatttcccatcaacaaatatttttagtaggatttttcctgtttctgttagtccttgcagtactcataaatgttttaagctgagcatactgtaatagtcataagtttaatttcattataataaaaataatcaaacaaaaggactttagaacccaagacaatgagctagttttccctaaagtttgctgaactattaaggaatatgttcttatagcttttgactagaatgagtcatgggaattctaagaagggatggcctagacatttttagctcagttaaattcagcatttaatgcaggtgagttcctgggtcgttttccaactagtctggaacagtctggttctgactcaaactggtataaagcattattttaggttttctctttgccagtttttaagcagttataaccatgtaaatcaagatgtgaggacatctatatgaagtatagtaaagaagtggtgtcagcagatcaatatgtgtgtcctgggtgtgctgctctcttaagtgagactttgtgagactatactttaaatgcattattaccattgcttacattttgggggattttcttcctcctcaaaacttccatttctattgtaatattcttaatgacaatctttttttttttttagcagtgtatgtttgaaacagccaaagatggcgatgaaccaagtgtaaattgatctaagcagcccatgcagtttgtgttgaatcaacaaacagtgtattgttgaagtgaaattattttctgaaatgacttgttagaccagttttgaggacatactcaaaagtagagtaataatggctcctgggatggagaaatatgagatgaacctggaacattctattatggtgccacaaaggaaatctaaaaaaaaaaaaaaaaaaaaaagtggttggctaggagcagtggcacacgcctgtgattccagcactttgggaggccgaagtgggcaggagttcaagaccagcctggccaacatagtgaaaccctgtctctactaaaaatacaaaaattagccgggtgtggtggcgggcgcctgtaatcccagcttttcaagaggctgaggcagaagaatcgcttgaacccgggagatggaggttgcagtgagctgagatcgtgccactgcactccagcctgggcgttgcagtgagactccgtctcaacaacaacaaaaaggtggatacatgtcaaaagggcacaggagccacttgaaggattatacttgctaaatctgtgtcaattatcaaaataaactggtagcaacgttacaactcactgaataagataccatgattccatgttgacttaaaaatggagagaagagaaagctctaacttgaatgtcagctaatttaaggtgaaaggattttatgtgttagaaaaatcaccattttgcaaactagttttcagaatccttaatatatgtcatctcttttattcctcataacagtaataagaaacagttaactgtttcagaaaagagtggggctgcccaaggcaaggcatgttggtaattggtaagctttatagagccaagacctcaacctgattttcttgctttcatgcagttaagccatggtgctcctcttgttatatcacccttttaaacccagagattgatagtattagccatcatttgctgagtgtcatgcactattctaagtgctttacatgtatttgcctaatcagcgccctgtgaagtacatcctgtctccattttgcatataaggataccaaagcacagagttggagggaagatagttatattcccttactttatttatttatttttttgagacagggtctcgcactgtcgcccaggcttgagtgctataagaccttaagtttcccctttcaaagtagtttatagtgtctaaatatcttacataaaagtatatatcaaatagggtggcagtctggaaagatttaaaatccagaatgactggaaggttgggcaactaagatttcttaaattgcagctgttttcaacatagatgtgttgtagagtcttttcggtttcaaaattaaattgactataaatggagtgtgcttaa

SEQ ID NO: 713 - DNA, 6172 bp, Homo sapiens
ttcggagcgagcgcccgagatccctttcccagagtgctctgcgccgtgaagaagcggctcccggggactgggggcattttgtgttggctggagctggagtaacaagatggcgtcgtccgcggagtgacaggggtccctctgggccggagccggcggcagtggtggcagcggtatcgccgccctagctcaccgcgccccttttccagcccgcgacgtcgccgcgcaagcgaggcagcggcggccgccgagaaacaagtggcccagcctggtaaccgccgagaagcccttcacaaactgcggcctggcaaaaagaaacctgactgagcggcggtgatcaggttcccctctgctgattctgggccccgaaccccggtaaaggcctccgtgttccgtttcctgccgccctcctccgtagccttgcctagtgtaggagccccgaggcctccgtcctcttcccagaggtgtcggggcttggccccagcctccatcttcgtctctcaggatggcgagtagcagcggctccaaggctgaattcattgtcggagggaaatataaactggtacggaagatcgggtctggctccttcggggacatctatttggcgatcaacatcaccaacggcgaggaagtggcagtgaagctagaatctcagaaggccaggcatccccagttgctgtacgagagcaagctctataagattcttcaaggtggggttggcatcccccacatacggtggtatggtcaggaaaaagactacaatgtactagtcatggatcttctgggacctagcctcgaagacctcttcaatttctgttcaagaaggttcacaatgaaaactgtacttatgttagctgaccagatgatcagtagaattgaatatgtgcatacaaagaattttatacacagagacattaaaccagataacttcctaatgggtattgggcgtcactgtaataagttattccttattgattttggtttggccaaaaagtacagagacaacaggacaaggcaacacataccatacagagaagataaaaacctcactggcactgcccgatatgctagcatcaatgcacatcttggtattgagcagagtcgccgagatgacatggaatcattaggatatgttttgatgtattttaatagaaccagcctgccatggcaagggctaaaggctgcaacaaagaaacaaaaatatgaaaagattagtgaaaagaagatgtccacgcctgttgaagttttatgtaaggggtttcctgcagaatttgcgatgtacttaaactattgtcgtgggctacgctttgaggaagccccagattacatgtatctgaggcagctattccgcattcttttcaggaccctgaaccatcaatatgactacacatttgattggacaatgttaaagcagaaagcagcacagcaggcagcctcttccagtgggcagggtcagcaggcccaaacccccacaggcaagcaaactgacaaaaccaagagtaacatgaaaggtttctaagcatgaattgaggaacagaagaagcagagcagatgatcggagcagcatttgtttctccccaaatctagaaattttagttcatatgtacactagccagtggttgtggacaaccatttacttggtgtaaagaacttaatttcagtataaactgactctgggcagcattggtgatgctgtatcctgagttgtagcctctgtaattgtgaatattaactgagatagtgaaacatggtgtccggttttctattgcattttttcaagtggaaaagttaactaaatggttgacacacaaaaattggtggagaaattgtgcatatgccaattttttgttaaaaccttttgttttgaactatactgctttgagatctcatttcagaagaacggcatgaacagtcttcagccacagttgtgatggttgttaaatgctcacaattgtgcattcttagggtttttccatccctggggtttgcaagttgttcacttaaaacattcttaaaatggttggcttcttgtctgcaagccagctgatatggtagcaaccaaagattccagtgtttgagcatatgaaagactctgcctgcttaattgtgctagaaataacagcatctaaagtgaagacttaagaaaaacttagtgactactagattatccttaggactctgcattaactctataatgttcttggtattaaaaaaaaagcatatttgtcacagaaatttagttaacatcttacaactgaacatgtatgtatgttgcttagataaatgtaatcactgtaaacatctatatgatctgggattttgtttttattttgaaatgggagcttttttgtttacaagttcattaaaaactaaaaactgtttctgtaaggaaatgagattttttttaaacaacaaaaaatgccttgctgactcactattaaataaaaatctccccaattttttgatagactacttcaagccatttgttacatggtattcctttgcaagtcaatttaggtttcgtgttataacttttcctctttttttaagaaaaatgaaaaaagtaattcttttgtctgaaggggaaaggcattctttcatttttttctttttttttttttttttttatgacttgcaggcacaatatctagtactgcaactgccagaacttggtattgtagctgctgcccgctgactagcagctggactgattttgaataaaaatgaaagcattaaagggtttccctacaaaacatttttctttaaaatacttttgaaatggctataagcagttgactttcacccttggagagcatcacactgtgtgaggttcagtgattgttgaccctccccagcccctcctgcttctttaagttatctgtgtgcgtgcgcttcctctcaatcttctttgcacgctcatttctttttctctgacccatgagaaaggaaaacttactgatgataatttttaaatagtgtaatttattcatttatagcatgtcaggataaattaaaagaacatttgtctggaaatgctgccgggagcctattgtgtaaatgtaggtattttgtaaaataaccttgaaattgtaaattgacacgtgtttggtcagattgtgtcaagtttaatttgttttgttttcttttttcttttttttatttgaaaactactttagcaataattaattccatgattatcacattctgccattaagggatattagtaccgtaatactgaagaaattttattaagtctgaacttctggggtaggcagcttctttgtttcttttctatccacccttgtcggttgaggtatttgtttcttgactaataaaccctttgatacttttagccagaaatcagtctcataaagctatttttgagtatagtttgtgtaaaataaaaatgtttagctttggtaataacttccaagctgaactccctctagcaagatatttttcagtgcttttatttactatgcacttagactatgcactttttctgaaatatttttgtaacacttttttgtatttttgccatttgaaaaggttgtggtgtagttggtctgtaattaagttgcagatttaaaactgctgttagctttgtaaatcaaaatataggtgttttttgtcctggtatatcgtcattccatctgcagctggagctggaatcccattgatcttctagctaccattcattttcttcactgttcacaaaagaagagtgtgaaattcagtgaatgctgttactaatcctgttacgagatgaatctcatttcaccaaaattaaattatgtttttccgctaaaatgatgatacaagttgaagacacatcactctgaaattggaagacctcaccacttaaggctccacagtggcttactcagctgaactctaggttactactctttactttgttcacccattggggggtgcagtttttttaaaatgttgggagatggccattctaactactgttgaatgtctctgttttgggaaggtataacaagaaataaaaaagaatatatatgaagggagagactggttatctcctcccatatggttgtgcttatcctcttatggcttacaaatgaatatttggaggtttgctttcacaatgatttcccatcaacaaatatttttagtaggatttttcctgtttctgttagtccttgcagtactcataaatgttttaagctgagcatactgtaatagtcataagtttaatttcattataataaaaataatcaaacaaaaggactttagaacccaagacaatgagctagttttccctaaagtttgctgaactattaaggaatatgttcttatagcttttgactagaatgagtcatgggaattctaagaagggatggcctagacatttttagctcagttaaattcagcatttaatgcaggtgagttcctgggtcgttttccaactagtctggaacagtctggttctgactcaaactggtataaagcattattttaggttttctctttgccagtttttaagcagttataaccatgtaaatcaagatgtgaggacatctatatgaagtatagtaaagaagtggtgtcagcagatcaatatgtgtgtcctgggtgtgctgctctcttaagtgagactttgtgagactatactttaaatgcattattaccattgcttacattttgggggattttcttcctcctcaaaacttccatttctattgtaatattcttaatgacaatctttttttttttttagcagtgtatgtttgaaacagccaaagatggcgatgaaccaagtgtaaattgatctaagcagcccatgcagtttgtgttgaatcaacaaacagtgtattgttgaagtgaaattattttctgaaatgacttgttagaccagttttgaggacatactcaaaagtagagtaataatggctcctgggatggagaaatatgagatgaacctggaacattctattatggtgccacaaaggaaatctaaaaaaaaaaaaaaaaaaaaaagtggttggctaggagcagtggcacacgcctgtgattccagcactttgggaggccgaagtgggcaggagttcaagaccagcctggccaacatagtgaaaccctgtctctactaaaaatacaaaaattagccgggtgtggtggcgggcgcctgtaatcccagcttttcaagaggctgaggcagaagaatcgcttgaacccgggagatggaggttgcagtgagctgagatcgtgccactgcactccagcctgggcgttgcagtgagactccgtctcaacaacaacaaaaaggtggatacatgtcaaaagggcacaggagccacttgaaggattatacttgctaaatctgtgtcaattatcaaaataaactggtagcaacgttacaactcactgaataagataccatgattccatgttgacttaaaaatggagagaagagaaagctctaacttgaatgtcagctaatttaaggtgaaaggattttatgtgttagaaaaatcaccattttgcaaactagttttcagaatccttaatatatgtcatctcttttattcctcataacagtaataagaaacagttaactgtttcagaaaagagtggggctgcccaaggcaaggcatgttggtaattggtaagctttatagagccaagacctcaacctgattttcttgctttcatgcagttaagccatggtgctcctcttgttatatcacccttttaaacccagagattgatagtattagccatcatttgctgagtgtcatgcactattctaagtgctttacatgtatttgcctaatcagcgccctgtgaagtacatcctgtctccattttgcatataaggataccaaagcacagagttggagggaagatagttatattcccttactttatttatttatttttttgagacagggtctcgcactgtcgcccaggcttgagtgctataagaccttaagtttcccctttcaaagtagtttatagtgtctaaatatcttacataaaagtatatatcaaatagggtggcagtctggaaagatttaaaatccagaatgactggaaggttgggcaactaagatttcttaaattgcagctgttttcaacatagatgtgttgtagagtcttttcggtttcaaaattaaattgactataaatggagtgtgcttaa

SEQ ID NO: 714 - DNA, 6176 bp, Homo sapiens
ttcggagcgagcgcccgagatccctttcccagagtgctctgcgccgtgaagaagcggctcccggggactgggggcattttgtgttggctggagctggagtaacaagatggcgtcgtccgcggagtgacaggggtccctctgggccggagccggcggcagtggtggcagcggtatcgccgccctagctcaccgcgccccttttccagcccgcgacgtcgccgcgcaagcgaggcagcggcggccgccgagaaacaagtggcccagcctggtaaccgccgagaagcccttcacaaactgcggcctggcaaaaagaaacctgactgagcggcggtgatcaggttcccctctgctgattctgggccccgaaccccggtaaaggcctccgtgttccgtttcctgccgccctcctccgtagccttgcctagtgtaggagccccgaggcctccgtcctcttcccagaggtgtcggggcttggccccagcctccatcttcgtctctcaggatggcgagtagcagcggctccaaggctgaattcattgtcggagggaaatataaactggtacggaagatcgggtctggctccttcggggacatctatttggcgatcaacatcaccaacggcgaggaagtggcagtgaagctagaatctcagaaggccaggcatccccagttgctgtacgagagcaagctctataagattcttcaaggtggggttggcatcccccacatacggtggtatggtcaggaaaaagactacaatgtactagtcatggatcttctgggacctagcctcgaagacctcttcaatttctgttcaagaaggttcacaatgaaaactgtacttatgttagctgaccagatgatcagtagaattgaatatgtgcatacaaagaattttatacacagagacattaaaccagataacttcctaatgggtattgggcgtcactgtaataagttattccttattgattttggtttggccaaaaagtacagagacaacaggacaaggcaacacataccatacagagaagataaaaacctcactggcactgcccgatatgctagcatcaatgcacatcttggtattgagcagagtcgccgagatgacatggaatcattaggatatgttttgatgtattttaatagaaccagcctgccatggcaagggctaaaggctgcaacaaagaaacaaaaatatgaaaagattagtgaaaagaagatgtccacgcctgttgaagttttatgtaaggggtttcctgcagaatttgcgatgtacttaaactattgtcgtgggctacgctttgaggaagccccagattacatgtatctgaggcagctattccgcattcttttcaggaccctgaaccatcaatatgactacacatttgattggacaatgttaaagcagaaagcagcacagcaggcagcctcttccagtgggcagggtcagcaggcccaaacccccacaggcaagcaaactgacaaaaccaagagtaacatgaaaggttagtttctaagcatgaattgaggaacagaagaagcagagcagatgatcggagcagcatttgtttctccccaaatctagaaattttagttcatatgtacactagccagtggttgtggacaaccatttacttggtgtaaagaacttaatttcagtataaactgactctgggcagcattggtgatgctgtatcctgagttgtagcctctgtaattgtgaatattaactgagatagtgaaacatggtgtccggttttctattgcattttttcaagtggaaaagttaactaaatggttgacacacaaaaattggtggagaaattgtgcatatgccaattttttgttaaaaccttttgttttgaactatactgctttgagatctcatttcagaagaacggcatgaacagtcttcagccacagttgtgatggttgttaaatgctcacaattgtgcattcttagggtttttccatccctggggtttgcaagttgttcacttaaaacattcttaaaatggttggcttcttgtctgcaagccagctgatatggtagcaaccaaagattccagtgtttgagcatatgaaagactctgcctgcttaattgtgctagaaataacagcatctaaagtgaagacttaagaaaaacttagtgactactagattatccttaggactctgcattaactctataatgttcttggtattaaaaaaaaagcatatttgtcacagaaatttagttaacatcttacaactgaacatgtatgtatgttgcttagataaatgtaatcactgtaaacatctatatgatctgggattttgtttttattttgaaatgggagcttttttgtttacaagttcattaaaaactaaaaactgtttctgtaaggaaatgagattttttttaaacaacaaaaaatgccttgctgactcactattaaataaaaatctccccaattttttgatagactacttcaagccatttgttacatggtattcctttgcaagtcaatttaggtttcgtgttataacttttcctctttttttaagaaaaatgaaaaaagtaattcttttgtctgaaggggaaaggcattctttcatttttttctttttttttttttttttttatgacttgcaggcacaatatctagtactgcaactgccagaacttggtattgtagctgctgcccgctgactagcagctggactgattttgaataaaaatgaaagcattaaagggtttccctacaaaacatttttctttaaaatacttttgaaatggctataagcagttgactttcacccttggagagcatcacactgtgtgaggttcagtgattgttgaccctccccagcccctcctgcttctttaagttatctgtgtgcgtgcgcttcctctcaatcttctttgcacgctcatttctttttctctgacccatgagaaaggaaaacttactgatgataatttttaaatagtgtaatttattcatttatagcatgtcaggataaattaaaagaacatttgtctggaaatgctgccgggagcctattgtgtaaatgtaggtattttgtaaaataaccttgaaattgtaaattgacacgtgtttggtcagattgtgtcaagtttaatttgttttgttttcttttttcttttttttatttgaaaactactttagcaataattaattccatgattatcacattctgccattaagggatattagtaccgtaatactgaagaaattttattaagtctgaacttctggggtaggcagcttctttgtttcttttctatccacccttgtcggttgaggtatttgtttcttgactaataaaccctttgatacttttagccagaaatcagtctcataaagctatttttgagtatagtttgtgtaaaataaaaatgtttagctttggtaataacttccaagctgaactccctctagcaagatatttttcagtgcttttatttactatgcacttagactatgcactttttctgaaatatttttgtaacacttttttgtatttttgccatttgaaaaggttgtggtgtagttggtctgtaattaagttgcagatttaaaactgctgttagctttgtaaatcaaaatataggtgttttttgtcctggtatatcgtcattccatctgcagctggagctggaatcccattgatcttctagctaccattcattttcttcactgttcacaaaagaagagtgtgaaattcagtgaatgctgttactaatcctgttacgagatgaatctcatttcaccaaaattaaattatgtttttccgctaaaatgatgatacaagttgaagacacatcactctgaaattggaagacctcaccacttaaggctccacagtggcttactcagctgaactctaggttactactctttactttgttcacccattggggggtgcagtttttttaaaatgttgggagatggccattctaactactgttgaatgtctctgttttgggaaggtataacaagaaataaaaaagaatatatatgaagggagagactggttatctcctcccatatggttgtgcttatcctcttatggcttacaaatgaatatttggaggtttgctttcacaatgatttcccatcaacaaatatttttagtaggatttttcctgtttctgttagtccttgcagtactcataaatgttttaagctgagcatactgtaatagtcataagtttaatttcattataataaaaataatcaaacaaaaggactttagaacccaagacaatgagctagttttccctaaagtttgctgaactattaaggaatatgttcttatagcttttgactagaatgagtcatgggaattctaagaagggatggcctagacatttttagctcagttaaattcagcatttaatgcaggtgagttcctgggtcgttttccaactagtctggaacagtctggttctgactcaaactggtataaagcattattttaggttttctctttgccagtttttaagcagttataaccatgtaaatcaagatgtgaggacatctatatgaagtatagtaaagaagtggtgtcagcagatcaatatgtgtgtcctgggtgtgctgctctcttaagtgagactttgtgagactatactttaaatgcattattaccattgcttacattttgggggattttcttcctcctcaaaacttccatttctattgtaatattcttaatgacaatctttttttttttttagcagtgtatgtttgaaacagccaaagatggcgatgaaccaagtgtaaattgatctaagcagcccatgcagtttgtgttgaatcaacaaacagtgtattgttgaagtgaaattattttctgaaatgacttgttagaccagttttgaggacatactcaaaagtagagtaataatggctcctgggatggagaaatatgagatgaacctggaacattctattatggtgccacaaaggaaatctaaaaaaaaaaaaaaaaaaaaaagtggttggctaggagcagtggcacacgcctgtgattccagcactttgggaggccgaagtgggcaggagttcaagaccagcctggccaacatagtgaaaccctgtctctactaaaaatacaaaaattagccgggtgtggtggcgggcgcctgtaatcccagcttttcaagaggctgaggcagaagaatcgcttgaacccgggagatggaggttgcagtgagctgagatcgtgccactgcactccagcctgggcgttgcagtgagactccgtctcaacaacaacaaaaaggtggatacatgtcaaaagggcacaggagccacttgaaggattatacttgctaaatctgtgtcaattatcaaaataaactggtagcaacgttacaactcactgaataagataccatgattccatgttgacttaaaaatggagagaagagaaagctctaacttgaatgtcagctaatttaaggtgaaaggattttatgtgttagaaaaatcaccattttgcaaactagttttcagaatccttaatatatgtcatctcttttattcctcataacagtaataagaaacagttaactgtttcagaaaagagtggggctgcccaaggcaaggcatgttggtaattggtaagctttatagagccaagacctcaacctgattttcttgctttcatgcagttaagccatggtgctcctcttgttatatcacccttttaaacccagagattgatagtattagccatcatttgctgagtgtcatgcactattctaagtgctttacatgtatttgcctaatcagcgccctgtgaagtacatcctgtctccattttgcatataaggataccaaagcacagagttggagggaagatagttatattcccttactttatttatttatttttttgagacagggtctcgcactgtcgcccaggcttgagtgctataagaccttaagtttcccctttcaaagtagtttatagtgtctaaatatcttacataaaagtatatatcaaatagggtggcagtctggaaagatttaaaatccagaatgactggaaggttgggcaactaagatttcttaaattgcagctgttttcaacatagatgtgttgtagagtcttttcggtttcaaaattaaattgactataaatggagtgtgcttaa

SEQ ID NO: 715 - DNA, 5910 bp, Homo sapiens
ttcggagcgagcgcccgagatccctttcccagagtgctctgcgccgtgaagaagcggctcccggggactgggggcattttgtgttggctggagctggagtaacaagatggcgtcgtccgcggagtgacaggggtccctctgggccggagccggcggcagtggtggcagcggtatcgccgccctagctcaccgcgccccttttccagcccgcgacgtcgccgcgcaagcgaggcagcggcggccgccgagaaacaagtggcccagcctggtaaccgccgagaagcccttcacaaactgcggcctggcaaaaagaaacctgactgagcggcggtgatcaggttcccctctgctgattctgggccccgaaccccggtaaaggcctccgtgttccgtttcctgccgccctcctccgtagccttgcctagtgtaggagccccgaggcctccgtcctcttcccagaggtgtcggggcttggccccagcctccatcttcgtctctcaggatggcgagtagcagcggctccaaggctgaattcattgtcggagggaaatataaactggtacggaagatcgggtctggctccttcggggacatctatttggcgatcaacatcaccaacggcgaggaagtggcagtgaagctagaatctcagaaggccaggcatccccagttgctgtacgagagcaagctctataagattcttcaaggtggggttggcatcccccacatacgttattccttattgattttggtttggccaaaaagtacagagacaacaggacaaggcaacacataccatacagagaagataaaaacctcactggcactgcccgatatgctagcatcaatgcacatcttggtattgagcagagtcgccgagatgacatggaatcattaggatatgttttgatgtattttaatagaaccagcctgccatggcaagggctaaaggctgcaacaaagaaacaaaaatatgaaaagattagtgaaaagaagatgtccacgcctgttgaagttttatgtaaggggtttcctgcagaatttgcgatgtacttaaactattgtcgtgggctacgctttgaggaagccccagattacatgtatctgaggcagctattccgcattcttttcaggaccctgaaccatcaatatgactacacatttgattggacaatgttaaagcagaaagcagcacagcaggcagcctcttccagtgggcagggtcagcaggcccaaacccccacaggtttctaagcatgaattgaggaacagaagaagcagagcagatgatcggagcagcatttgtttctccccaaatctagaaattttagttcatatgtacactagccagtggttgtggacaaccatttacttggtgtaaagaacttaatttcagtataaactgactctgggcagcattggtgatgctgtatcctgagttgtagcctctgtaattgtgaatattaactgagatagtgaaacatggtgtccggttttctattgcattttttcaagtggaaaagttaactaaatggttgacacacaaaaattggtggagaaattgtgcatatgccaattttttgttaaaaccttttgttttgaactatactgctttgagatctcatttcagaagaacggcatgaacagtcttcagccacagttgtgatggttgttaaatgctcacaattgtgcattcttagggtttttccatccctggggtttgcaagttgttcacttaaaacattcttaaaatggttggcttcttgtctgcaagccagctgatatggtagcaaccaaagattccagtgtttgagcatatgaaagactctgcctgcttaattgtgctagaaataacagcatctaaagtgaagacttaagaaaaacttagtgactactagattatccttaggactctgcattaactctataatgttcttggtattaaaaaaaaagcatatttgtcacagaaatttagttaacatcttacaactgaacatgtatgtatgttgcttagataaatgtaatcactgtaaacatctatatgatctgggattttgtttttattttgaaatgggagcttttttgtttacaagttcattaaaaactaaaaactgtttctgtaaggaaatgagattttttttaaacaacaaaaaatgccttgctgactcactattaaataaaaatctccccaattttttgatagactacttcaagccatttgttacatggtattcctttgcaagtcaatttaggtttcgtgttataacttttcctctttttttaagaaaaatgaaaaaagtaattcttttgtctgaaggggaaaggcattctttcatttttttctttttttttttttttttttatgacttgcaggcacaatatctagtactgcaactgccagaacttggtattgtagctgctgcccgctgactagcagctggactgattttgaataaaaatgaaagcattaaagggtttccctacaaaacatttttctttaaaatacttttgaaatggctataagcagttgactttcacccttggagagcatcacactgtgtgaggttcagtgattgttgaccctccccagcccctcctgcttctttaagttatctgtgtgcgtgcgcttcctctcaatcttctttgcacgctcatttctttttctctgacccatgagaaaggaaaacttactgatgataatttttaaatagtgtaatttattcatttatagcatgtcaggataaattaaaagaacatttgtctggaaatgctgccgggagcctattgtgtaaatgtaggtattttgtaaaataaccttgaaattgtaaattgacacgtgtttggtcagattgtgtcaagtttaatttgttttgttttcttttttcttttttttatttgaaaactactttagcaataattaattccatgattatcacattctgccattaagggatattagtaccgtaatactgaagaaattttattaagtctgaacttctggggtaggcagcttctttgtttcttttctatccacccttgtcggttgaggtatttgtttcttgactaataaaccctttgatacttttagccagaaatcagtctcataaagctatttttgagtatagtttgtgtaaaataaaaatgtttagctttggtaataacttccaagctgaactccctctagcaagatatttttcagtgcttttatttactatgcacttagactatgcactttttctgaaatatttttgtaacacttttttgtatttttgccatttgaaaaggttgtggtgtagttggtctgtaattaagttgcagatttaaaactgctgttagctttgtaaatcaaaatataggtgttttttgtcctggtatatcgtcattccatctgcagctggagctggaatcccattgatcttctagctaccattcattttcttcactgttcacaaaagaagagtgtgaaattcagtgaatgctgttactaatcctgttacgagatgaatctcatttcaccaaaattaaattatgtttttccgctaaaatgatgatacaagttgaagacacatcactctgaaattggaagacctcaccacttaaggctccacagtggcttactcagctgaactctaggttactactctttactttgttcacccattggggggtgcagtttttttaaaatgttgggagatggccattctaactactgttgaatgtctctgttttgggaaggtataacaagaaataaaaaagaatatatatgaagggagagactggttatctcctcccatatggttgtgcttatcctcttatggcttacaaatgaatatttggaggtttgctttcacaatgatttcccatcaacaaatatttttagtaggatttttcctgtttctgttagtccttgcagtactcataaatgttttaagctgagcatactgtaatagtcataagtttaatttcattataataaaaataatcaaacaaaaggactttagaacccaagacaatgagctagttttccctaaagtttgctgaactattaaggaatatgttcttatagcttttgactagaatgagtcatgggaattctaagaagggatggcctagacatttttagctcagttaaattcagcatttaatgcaggtgagttcctgggtcgttttccaactagtctggaacagtctggttctgactcaaactggtataaagcattattttaggttttctctttgccagtttttaagcagttataaccatgtaaatcaagatgtgaggacatctatatgaagtatagtaaagaagtggtgtcagcagatcaatatgtgtgtcctgggtgtgctgctctcttaagtgagactttgtgagactatactttaaatgcattattaccattgcttacattttgggggattttcttcctcctcaaaacttccatttctattgtaatattcttaatgacaatctttttttttttttagcagtgtatgtttgaaacagccaaagatggcgatgaaccaagtgtaaattgatctaagcagcccatgcagtttgtgttgaatcaacaaacagtgtattgttgaagtgaaattattttctgaaatgacttgttagaccagttttgaggacatactcaaaagtagagtaataatggctcctgggatggagaaatatgagatgaacctggaacattctattatggtgccacaaaggaaatctaaaaaaaaaaaaaaaaaaaaaagtggttggctaggagcagtggcacacgcctgtgattccagcactttgggaggccgaagtgggcaggagttcaagaccagcctggccaacatagtgaaaccctgtctctactaaaaatacaaaaattagccgggtgtggtggcgggcgcctgtaatcccagcttttcaagaggctgaggcagaagaatcgcttgaacccgggagatggaggttgcagtgagctgagatcgtgccactgcactccagcctgggcgttgcagtgagactccgtctcaacaacaacaaaaaggtggatacatgtcaaaagggcacaggagccacttgaaggattatacttgctaaatctgtgtcaattatcaaaataaactggtagcaacgttacaactcactgaataagataccatgattccatgttgacttaaaaatggagagaagagaaagctctaacttgaatgtcagctaatttaaggtgaaaggattttatgtgttagaaaaatcaccattttgcaaactagttttcagaatccttaatatatgtcatctcttttattcctcataacagtaataagaaacagttaactgtttcagaaaagagtggggctgcccaaggcaaggcatgttggtaattggtaagctttatagagccaagacctcaacctgattttcttgctttcatgcagttaagccatggtgctcctcttgttatatcacccttttaaacccagagattgatagtattagccatcatttgctgagtgtcatgcactattctaagtgctttacatgtatttgcctaatcagcgccctgtgaagtacatcctgtctccattttgcatataaggataccaaagcacagagttggagggaagatagttatattcccttactttatttatttatttttttgagacagggtctcgcactgtcgcccaggcttgagtgctataagaccttaagtttcccctttcaaagtagtttatagtgtctaaatatcttacataaaagtatatatcaaatagggtggcagtctggaaagatttaaaatccagaatgactggaaggttgggcaactaagatttcttaaattgcagctgttttcaacatagatgtgttgtagagtcttttcggtttcaaaattaaattgactataaatggagtgtgcttaa

SEQ ID NO: 716 - DNA, 4377 bp, Homo sapiens
ttcggagcgagcgcccgagatccctttcccagagtgctctgcgccgtgaagaagcggctcccggggactgggggcattttgtgttggctggagctggagtaacaagatggcgtcgtccgcggagtgacaggggtccctctgggccggagccggcggcagtggtggcagcggtatcgccgccctagctcaccgcgccccttttccagcccgcgacgtcgccgcgcaagcgaggcagcggcggccgccgagaaacaagtggcccagcctggtaaccgccgagaagcccttcacaaactgcggcctggcaaaaagaaacctgactgagcggcggtgatcaggttcccctctgctgattctgggccccgaaccccggtaaaggcctccgtgttccgtttcctgccgccctcctccgtagccttgcctagtgtaggagccccgaggcctccgtcctcttcccagaggtgtcggggcttggccccagcctccatcttcgtctctcaggatggcgagtagcagcggctccaaggctgaattcattgtcggagggaaatataaactggtacggaagatcgggtctggctccttcggggacatctatttggcgatcaacatcaccaacggcgaggaagtggcagtgaagctagaatctcagaaggccaggcatccccagttgctgtacgagagcaagctctataagattcttcaaggtggggttggcatcccccacatacggtggtatggtcaggaaaaagactacaatgtactagtcatggatcttctgggacctagcctcgaagacctcttcaatttctgttcaagaaggttcacaatgaaaactgtacttatgttagctgaccagatgatcagtagaattgaatatgtgcatacaaagaattttatacacagagacattaaaccagataacttcctaatgggtattgggcgtcactgtaataagttattccttattgattttggtttggccaaaaagtacagagacaacaggacaaggcaacacataccatacagagaagataaaaacctcactggcactgcccgatatgctagcatcaatgcacatcttggtattgagcagagtcgccgagatgacatggaatcattaggatatgttttgatgtattttaatagaaccagcctgccatggcaagggctaaaggctgcaacaaagaaacaaaaatatgaaaagattagtgaaaagaagatgtccacgcctgttgaagttttatgtaaggggtttcctgcagaatttgcgatgtacttaaactattgtcgtgggctacgctttgaggaagccccagattacatgtatctgaggcagctattccgcattcttttcaggaccctgaaccatcaatatgactacacatttgattggacaatgttaaagcagaaagcagcacagcaggcagcctcttccagtgggcagggtcagcaggcccaaacccccacaggcaagcaaactgacaaaaccaagagtaacatgaaaggtttctaagcatgaattgaggaacagaagaagcagagcagatgatcggagcagcatttgtttctccccaaatctagaaattttagttcatatgtacactagccagtggttgtggacaaccatttacttggtgtaaagaacttaatttcagtataaactgactctgggcagcattggtgatgctgtatcctgagttgtagcctctgtaattgtgaatattaactgagatagtgaaacatggtgtccggttttctattgcattttttcaagtggaaaagttaactaaatggttgacacacaaaaattggtggagaaattgtgcatatgccaattttttgttaaaaccttttgttttgaactatactgctttgagatctcatttcagaagaacggcatgaacagtcttcagccacagttgtgatggttgttaaatgctcacaattgtgcattcttagggtttttccatccctggggtttgcaagttgttcacttaaaacattcttaaaatggttggcttcttgtctgcaagccagctgatatggtagcaaccaaagattccagtgtttgagcatatgaaagactctgcctgcttaattgtgctagaaataacagcatctaaagtgaagacttaagaaaaacttagtgactactagattatccttaggactctgcattaactctataatgttcttggtattaaaaaaaaagcatatttgtcacagaaatttagttaacatcttacaactgaacatgtatgtatgttgcttagataaatgtaatcactgtaaacatctatatgatctgggattttgtttttattttgaaatgggagcttttttgtttacaagttcattaaaaactaaaaactgtttctgtaaggaaatgagattttttttaaacaacaaaaaatgccttgctgactcactattaaataaaaatctccccaattttttgatagactacttcaagccatttgttacatggtattcctttgcaagtcaatttaggtttcgtgttataacttttcctctttttttaagaaaaatgaaaaaagtaattcttttgtctgaaggggaaaggcattctttcatttttttctttttttttttttttttttatgacttgcaggcacaatatctagtactgcaactgccagaacttggtattgtagctgctgcccgctgactagcagctggactgattttgaataaaaatgaaagcattaaagggtttccctacaaaacatttttctttaaaatacttttgaaatggctataagcagttgactttcacccttggagagcatcacactgtgtgaggttcagtgattgttgaccctccccagcccctcctgcttctttaagttatctgtgtgcgtgcgcttcctctcaatcttctttgcacgctcatttctttttctctgacccatgagaaaggaaaacttactgatgataatttttaaatagtgtaatttattcatttatagcatgtcaggataaattaaaagaacatttgtctggaaatgctgccgggagcctattgtgtaaatgtaggtattttgtaaaataaccttgaaattgtaaattgacacgtgtttggtcagattgtgtcaagtttaatttgttttgttttcttttttcttttttttatttgaaaactactttagcaataattaattccatgattatcacattctgccattaagggatattagtaccgtaatactgaagaaattttattaagtctgaacttctggggtaggcagcttctttgtttcttttctatccacccttgtcggttgaggtatttgtttcttgactaataaaccctttgatacttttagccagaaatcagtctcataaagctatttttgagtatagtttgtgtaaaataaaaatgtttagctttggtaataacttccaagctgaactccctctagcaagatatttttcagtgcttttatttactatgcacttagactatgcactttttctgaaatatttttgtaacacttttttgtatttttgccatttgaaaaggttgtggtgtagttggtctgtaattaagttgcagatttaaaactgctgttagctttgtaaatcaaaatataggtgttttttgtcctggtatatcgtcattccatctgcagctggagctggaatcccattgatcttctagctaccattcattttcttcactgttcacaaaagaagagtgtgaaattcagtgaatgctgttactaatcctgttacgagatgaatctcatttcaccaaaattaaattatgtttttccgctaaaatgatgatacaagttgaagacacatcactctgaaattggaagacctcaccacttaaggctccacagtggcttactcagctgaactctagcagtgtatgtttgaaacagccaaagatggcgatgaaccaagtgtaaattgatctaagcagcccatgcagtttgtgttgaatcaacaaacagtgtattgttgaagtgaaattattttctgaaatgacttgttagaccagttttgaggacatactcaaaagtagagtaataatggctcctgggatggagaaatatgagatgaacctggaacattctattatggtgccacaaaggaaatctaaaaaaaaaaaaaaaaaaaaaagtggttggctaggagcagtggcacacgcctgtgattccagcactttgggaggccgaagtgggcaggagttcaagaccagcctggccaacatagtgaaaccctgtctctactaaaaatacaaaaattagccgggtgtggtggcgggcgcctgtaatcccagcttttcaagaggctgaggcagaagaatcgcttgaacccgggagatggaggttgcagtgagct

SEQ ID NO: 717 - DNA, 4780 bp, Homo sapiens
ccccatccccaccgcctccaggctgccggggctgggccgctgtacgggagccaaggtgcggtgccccgcgtgtggacgagccgaggtgcagcccgcggggccgcagggccggggtggggcggggcgcggcgggagcagatccggtgtttgcggaatcaggaggggcgggccggggcgggccctcggcgctgcaggagctgcccagaaacttttccctgctctcaccgggcgggggagagaagccctctggacagcttctagagtgtgcaggttctcgtatccctcggccaagggtatcctctgcaaacctctgcaaacccagcgcaactacggtcccccggtcagacccaggatggggccagaacggacaggggccgcgccgctgccgctgctgctggtgttagcgctcagtcaaggcattttaaattgttgtttggcctacaatgttggtctcccagaagcaaaaatattttccggtccttcaagtgaacagtttggctatgcagtgcagcagtttataaatccaaaaggcaactggttactggttggttcaccctggagtggctttcctgagaaccgaatgggagatgtgtataaatgtcctgttgacctatccactgccacatgtgaaaaactaaatttgcaaacttcaacaagcattccaaatgttactgagatgaaaaccaacatgagcctcggcttgatcctcaccaggaacatgggaactggaggttttctcacatgtggtcctctgtgggcacagcaatgtgggaatcagtattacacaacgggtgtgtgttctgacatcagtcctgattttcagctctcagccagcttctcacctgcaactcagccctgcccttccctcatagatgttgtggttgtgtgtgatgaatcaaatagtatttatccttgggatgcagtaaagaattttttggaaaaatttgtacaaggcctggatataggccccacaaagacacaggtggggttaattcagtatgccaataatccaagagttgtgtttaacttgaacacatataaaaccaaagaagaaatgattgtagcaacatcccagacatcccaatatggtggggacctcacaaacacattcggagcaattcaatatgcaagaaaatatgcttattcagcagcttctggtgggcgacgaagtgctacgaaagtaatggtagttgtaactgacggtgaatcacatgatggttcaatgttgaaagctgtgattgatcaatgcaaccatgacaatatactgaggtttggcatagcagttcttgggtacttaaacagaaacgcccttgatactaaaaatttaataaaagaaataaaagcaatcgctagtattccaacagaaagatactttttcaatgtgtctgatgaagcagctctactagaaaaggctgggacattaggagaacaaattttcagcattgaaggtactgttcaaggaggagacaactttcagatggaaatgtcacaagtgggattcagtgcagattactcttctcaaaatgatattctgatgctgggtgcagtgggagcttttggctggagtgggaccattgtccagaagacatctcatggccatttgatctttcctaaacaagcctttgaccaaattctgcaggacagaaatcacagttcatatttaggttactctgtggctgcaatttctactggagaaagcactcactttgttgctggtgctcctcgggcaaattataccggccagatagtgctatatagtgtgaatgagaatggcaatatcacggttattcaggctcaccgaggtgaccagattggctcctattttggtagtgtgctgtgttcagttgatgtggataaagacaccattacagacgtgctcttggtaggtgcaccaatgtacatgagtgacctaaagaaagaggaaggaagagtctacctgtttactatcaaagagggcattttgggtcagcaccaatttcttgaaggccccgagggcattgaaaacactcgatttggttcagcaattgcagctctttcagacatcaacatggatggctttaatgatgtgattgttggttcaccactagaaaatcagaattctggagctgtatacatttacaatggtcatcagggcactatccgcacaaagtattcccagaaaatcttgggatccgatggagcctttaggagccatctccagtactttgggaggtccttggatggctatggagatttaaatggggattccatcaccgatgtgtctattggtgcctttggacaagtggttcaactctggtcacaaagtattgctgatgtagctatagaagcttcattcacaccagaaaaaatcactttggtcaacaagaatgctcagataattctcaaactctgcttcagtgcaaagttcagacctactaagcaaaacaatcaagtggccattgtatataacatcacacttgatgcagatggattttcatccagagtaacctccagggggttatttaaagaaaacaatgaaaggtgcctgcagaagaatatggtagtaaatcaagcacagagttgccccgagcacatcatttatatacaggagccctctgatgttgtcaactctttggatttgcgtgtggacatcagtctggaaaaccctggcactagccctgcccttgaagcctattctgagactgccaaggtcttcagtattcctttccacaaagactgtggtgaggacggactttgcatttctgatctagtcctagatgtccgacaaataccagctgctcaagaacaaccctttattgtcagcaaccaaaacaaaaggttaacattttcagtaacgctgaaaaataaaagggaaagtgcatacaacactggaattgttgttgatttttcagaaaacttgttttttgcatcattctccctgccggttgatgggacagaagtaacatgccaggtggctgcatctcagaagtctgttgcctgcgatgtaggctaccctgctttaaagagagaacaacaggtgacttttactattaactttgacttcaatcttcaaaaccttcagaatcaggcgtctctcagtttccaagccttaagtgaaagccaagaagaaaacaaggctgataatttggtcaacctcaaaattcctctcctgtatgatgctgaaattcacttaacaagatctaccaacataaatttttatgaaatctcttcggatgggaatgttccttcaatcgtgcacagttttgaagatgttggtccaaaattcatcttctccctgaaggttggaagtgttccagtaagcatggcaactgtaatcatccacatccctcagtataccaaagaaaagaacccactgatgtacctaactggggtgcaaacagacaaggctggtgacatcagttgtaatgcagatatcaatccactgaaaataggacaaacatcttcttctgtatctttcaaaagtgaaaatttcaggcacaccaaagaattgaactgcagaactgcttcctgtagtaatgttacctgctggttgaaagacgttcacatgaaaggagaatactttgttaatgtgactaccagaatttggaacgggactttcgcatcatcaacgttccagacagtacagctaacggcagctgcagaaatcaacacctataaccctgagatatatgtgattgaagataacactgttacgattcccctgatgataatgaaacctgatgagaaagccgaagtaccaacaggagttataataggaagtataattgctggaatccttttgctgttagctctggttgcaattttatggaagctcggcttcttcaaaagaaaatatgaaaagatgaccaaaaatccagatgagattgatgagaccacagagctcagtagctgaaccagcagacctacctgcagtgggaaccggcagcatcccagccagggtttgctgtttgcgtgaatggatttctttttaaatcccatattttttttatcatgtcgtaggtaaactaacctggtattttaagagaaaactgcaggtcagtttggaatgaagaaattgtggggggtgggggaggtgcggggggcaggtagggaaataatagggaaaatacctattttatatgatgggggaaaaaaagtaatctttaaactggctggcccagagtttacattctaatttgcattgtgtcagaaacatgaaatgcttccaagcatgacaacttttaaagaaaaatatgatactctcagattttaagggggaaaactgttctctttaaaatatttgtctttaaacagcaactacagaagtggaagtgcttgatatgtaagtacttccacttgtgtatattttaatgaatattgatgttaacaagaggggaaaacaaaacacaggttttttcaatttatgctgctcatccaaagttgccacagatgatacttccaagtgataattttatttataaactaggtaaaatttgttgttggttccttttagaccacggctgccccttccacaccccatcttgctctaatgatcaaaacatgcttgaataactgagcttagagtatacctcctatatgtccatttaagttaggagagggggcgatatagagactaaggcacaaaattttgtttaaaactcagaatataacatgtaaaatcccatctgctagaagcccatcctgtgccagaggaagatttgtttggctgactggcagtaacctagtgaatttctgaaagatgagtaatttctttggcaaccttcctcctcccttactgaac

SEQ ID NO: 718 - DNA, 4461 bp, Homo sapiens
ttcggagcgagcgcccgagatccctttcccagagtgctctgcgccgtgaagaagcggctcccggggactgggggcattttgtgttggctggagctggagtaacaagatggcgtcgtccgcggagtgacaggggtccctctgggccggagccggcggcagtggtggcagcggtatcgccgccctagctcaccgcgccccttttccagcccgcgacgtcgccgcgcaagcgaggcagcggcggccgccgagaaacaagtggcccagcctggtaaccgccgagaagcccttcacaaactgcggcctggcaaaaagaaacctgactgagcggcggtgatcaggttcccctctgctgattctgggccccgaaccccggtaaaggcctccgtgttccgtttcctgccgccctcctccgtagccttgcctagtgtaggagccccgaggcctccgtcctcttcccagaggtgtcggggcttggccccagcctccatcttcgtctctcaggatggcgagtagcagcggctccaaggctgaattcattgtcggagggaaatataaactggtacggaagatcgggtctggctccttcggggacatctatttggcgatcaacatcaccaacggcgaggaagtggcagtgaagctagaatctcagaaggccaggcatccccagttgctgtacgagagcaagctctataagattcttcaaggtggggttggcatcccccacatacggtggtatggtcaggaaaaagactacaatgtactagtcatggatcttctgggacctagcctcgaagacctcttcaatttctgttcaagaaggttcacaatgaaaactgtacttatgttagctgaccagatgatcagtagaattgaatatgtgcatacaaagaattttatacacagagacattaaaccagataacttcctaatgggtattgggcgtcactgtaataagtgtttagaatctccagtggggaagaggaaaagaagcatgactgttagtacttctcaggacccatctttctcaggattaaaccagttattccttattgattttggtttggccaaaaagtacagagacaacaggacaaggcaacacataccatacagagaagataaaaacctcactggcactgcccgatatgctagcatcaatgcacatcttggtattgagcagagtcgccgagatgacatggaatcattaggatatgttttgatgtattttaatagaaccagcctgccatggcaagggctaaaggctgcaacaaagaaacaaaaatatgaaaagattagtgaaaagaagatgtccacgcctgttgaagttttatgtaaggggtttcctgcagaatttgcgatgtacttaaactattgtcgtgggctacgctttgaggaagccccagattacatgtatctgaggcagctattccgcattcttttcaggaccctgaaccatcaatatgactacacatttgattggacaatgttaaagcagaaagcagcacagcaggcagcctcttccagtgggcagggtcagcaggcccaaacccccacaggcaagcaaactgacaaaaccaagagtaacatgaaaggtttctaagcatgaattgaggaacagaagaagcagagcagatgatcggagcagcatttgtttctccccaaatctagaaattttagttcatatgtacactagccagtggttgtggacaaccatttacttggtgtaaagaacttaatttcagtataaactgactctgggcagcattggtgatgctgtatcctgagttgtagcctctgtaattgtgaatattaactgagatagtgaaacatggtgtccggttttctattgcattttttcaagtggaaaagttaactaaatggttgacacacaaaaattggtggagaaattgtgcatatgccaattttttgttaaaaccttttgttttgaactatactgctttgagatctcatttcagaagaacggcatgaacagtcttcagccacagttgtgatggttgttaaatgctcacaattgtgcattcttagggtttttccatccctggggtttgcaagttgttcacttaaaacattcttaaaatggttggcttcttgtctgcaagccagctgatatggtagcaaccaaagattccagtgtttgagcatatgaaagactctgcctgcttaattgtgctagaaataacagcatctaaagtgaagacttaagaaaaacttagtgactactagattatccttaggactctgcattaactctataatgttcttggtattaaaaaaaaagcatatttgtcacagaaatttagttaacatcttacaactgaacatgtatgtatgttgcttagataaatgtaatcactgtaaacatctatatgatctgggattttgtttttattttgaaatgggagcttttttgtttacaagttcattaaaaactaaaaactgtttctgtaaggaaatgagattttttttaaacaacaaaaaatgccttgctgactcactattaaataaaaatctccccaattttttgatagactacttcaagccatttgttacatggtattcctttgcaagtcaatttaggtttcgtgttataacttttcctctttttttaagaaaaatgaaaaaagtaattcttttgtctgaaggggaaaggcattctttcatttttttctttttttttttttttttttatgacttgcaggcacaatatctagtactgcaactgccagaacttggtattgtagctgctgcccgctgactagcagctggactgattttgaataaaaatgaaagcattaaagggtttccctacaaaacatttttctttaaaatacttttgaaatggctataagcagttgactttcacccttggagagcatcacactgtgtgaggttcagtgattgttgaccctccccagcccctcctgcttctttaagttatctgtgtgcgtgcgcttcctctcaatcttctttgcacgctcatttctttttctctgacccatgagaaaggaaaacttactgatgataatttttaaatagtgtaatttattcatttatagcatgtcaggataaattaaaagaacatttgtctggaaatgctgccgggagcctattgtgtaaatgtaggtattttgtaaaataaccttgaaattgtaaattgacacgtgtttggtcagattgtgtcaagtttaatttgttttgttttcttttttcttttttttatttgaaaactactttagcaataattaattccatgattatcacattctgccattaagggatattagtaccgtaatactgaagaaattttattaagtctgaacttctggggtaggcagcttctttgtttcttttctatccacccttgtcggttgaggtatttgtttcttgactaataaaccctttgatacttttagccagaaatcagtctcataaagctatttttgagtatagtttgtgtaaaataaaaatgtttagctttggtaataacttccaagctgaactccctctagcaagatatttttcagtgcttttatttactatgcacttagactatgcactttttctgaaatatttttgtaacacttttttgtatttttgccatttgaaaaggttgtggtgtagttggtctgtaattaagttgcagatttaaaactgctgttagctttgtaaatcaaaatataggtgttttttgtcctggtatatcgtcattccatctgcagctggagctggaatcccattgatcttctagctaccattcattttcttcactgttcacaaaagaagagtgtgaaattcagtgaatgctgttactaatcctgttacgagatgaatctcatttcaccaaaattaaattatgtttttccgctaaaatgatgatacaagttgaagacacatcactctgaaattggaagacctcaccacttaaggctccacagtggcttactcagctgaactctagcagtgtatgtttgaaacagccaaagatggcgatgaaccaagtgtaaattgatctaagcagcccatgcagtttgtgttgaatcaacaaacagtgtattgttgaagtgaaattattttctgaaatgacttgttagaccagttttgaggacatactcaaaagtagagtaataatggctcctgggatggagaaatatgagatgaacctggaacattctattatggtgccacaaaggaaatctaaaaaaaaaaaaaaaaaaaaaagtggttggctaggagcagtggcacacgcctgtgattccagcactttgggaggccgaagtgggcaggagttcaagaccagcctggccaacatagtgaaaccctgtctctactaaaaatacaaaaattagccgggtgtggtggcgggcgcctgtaatcccagcttttcaagaggctgaggcagaagaatcgcttgaacccgggagatggaggttgcagtgagct

SEQ ID NO: 719 - DNA, 4341 bp, Homo sapiens
ttcggagcgagcgcccgagatccctttcccagagtgctctgcgccgtgaagaagcggctcccggggactgggggcattttgtgttggctggagctggagtaacaagatggcgtcgtccgcggagtgacaggggtccctctgggccggagccggcggcagtggtggcagcggtatcgccgccctagctcaccgcgccccttttccagcccgcgacgtcgccgcgcaagcgaggcagcggcggccgccgagaaacaagtggcccagcctggtaaccgccgagaagcccttcacaaactgcggcctggcaaaaagaaacctgactgagcggcggtgatcaggttcccctctgctgattctgggccccgaaccccggtaaaggcctccgtgttccgtttcctgccgccctcctccgtagccttgcctagtgtaggagccccgaggcctccgtcctcttcccagaggtgtcggggcttggccccagcctccatcttcgtctctcaggatggcgagtagcagcggctccaaggctgaattcattgtcggagggaaatataaactggtacggaagatcgggtctggctccttcggggacatctatttggcgatcaacatcaccaacggcgaggaagtggcagtgaagctagaatctcagaaggccaggcatccccagttgctgtacgagagcaagctctataagattcttcaaggtggggttggcatcccccacatacggtggtatggtcaggaaaaagactacaatgtactagtcatggatcttctgggacctagcctcgaagacctcttcaatttctgttcaagaaggttcacaatgaaaactgtacttatgttagctgaccagatgatcagtagaattgaatatgtgcatacaaagaattttatacacagagacattaaaccagataacttcctaatgggtattgggcgtcactgtaataagttattccttattgattttggtttggccaaaaagtacagagacaacaggacaaggcaacacataccatacagagaagataaaaacctcactggcactgcccgatatgctagcatcaatgcacatcttggtattgagcagagtcgccgagatgacatggaatcattaggatatgttttgatgtattttaatagaaccagcctgccatggcaagggctaaaggctgcaacaaagaaacaaaaatatgaaaagattagtgaaaagaagatgtccacgcctgttgaagttttatgtaaggggtttcctgcagaatttgcgatgtacttaaactattgtcgtgggctacgctttgaggaagccccagattacatgtatctgaggcagctattccgcattcttttcaggaccctgaaccatcaatatgactacacatttgattggacaatgttaaagcagaaagcagcacagcaggcagcctcttccagtgggcagggtcagcaggcccaaacccccacaggtttctaagcatgaattgaggaacagaagaagcagagcagatgatcggagcagcatttgtttctccccaaatctagaaattttagttcatatgtacactagccagtggttgtggacaaccatttacttggtgtaaagaacttaatttcagtataaactgactctgggcagcattggtgatgctgtatcctgagttgtagcctctgtaattgtgaatattaactgagatagtgaaacatggtgtccggttttctattgcattttttcaagtggaaaagttaactaaatggttgacacacaaaaattggtggagaaattgtgcatatgccaattttttgttaaaaccttttgttttgaactatactgctttgagatctcatttcagaagaacggcatgaacagtcttcagccacagttgtgatggttgttaaatgctcacaattgtgcattcttagggtttttccatccctggggtttgcaagttgttcacttaaaacattcttaaaatggttggcttcttgtctgcaagccagctgatatggtagcaaccaaagattccagtgtttgagcatatgaaagactctgcctgcttaattgtgctagaaataacagcatctaaagtgaagacttaagaaaaacttagtgactactagattatccttaggactctgcattaactctataatgttcttggtattaaaaaaaaagcatatttgtcacagaaatttagttaacatcttacaactgaacatgtatgtatgttgcttagataaatgtaatcactgtaaacatctatatgatctgggattttgtttttattttgaaatgggagcttttttgtttacaagttcattaaaaactaaaaactgtttctgtaaggaaatgagattttttttaaacaacaaaaaatgccttgctgactcactattaaataaaaatctccccaattttttgatagactacttcaagccatttgttacatggtattcctttgcaagtcaatttaggtttcgtgttataacttttcctctttttttaagaaaaatgaaaaaagtaattcttttgtctgaaggggaaaggcattctttcatttttttctttttttttttttttttttatgacttgcaggcacaatatctagtactgcaactgccagaacttggtattgtagctgctgcccgctgactagcagctggactgattttgaataaaaatgaaagcattaaagggtttccctacaaaacatttttctttaaaatacttttgaaatggctataagcagttgactttcacccttggagagcatcacactgtgtgaggttcagtgattgttgaccctccccagcccctcctgcttctttaagttatctgtgtgcgtgcgcttcctctcaatcttctttgcacgctcatttctttttctctgacccatgagaaaggaaaacttactgatgataatttttaaatagtgtaatttattcatttatagcatgtcaggataaattaaaagaacatttgtctggaaatgctgccgggagcctattgtgtaaatgtaggtattttgtaaaataaccttgaaattgtaaattgacacgtgtttggtcagattgtgtcaagtttaatttgttttgttttcttttttcttttttttatttgaaaactactttagcaataattaattccatgattatcacattctgccattaagggatattagtaccgtaatactgaagaaattttattaagtctgaacttctggggtaggcagcttctttgtttcttttctatccacccttgtcggttgaggtatttgtttcttgactaataaaccctttgatacttttagccagaaatcagtctcataaagctatttttgagtatagtttgtgtaaaataaaaatgtttagctttggtaataacttccaagctgaactccctctagcaagatatttttcagtgcttttatttactatgcacttagactatgcactttttctgaaatatttttgtaacacttttttgtatttttgccatttgaaaaggttgtggtgtagttggtctgtaattaagttgcagatttaaaactgctgttagctttgtaaatcaaaatataggtgttttttgtcctggtatatcgtcattccatctgcagctggagctggaatcccattgatcttctagctaccattcattttcttcactgttcacaaaagaagagtgtgaaattcagtgaatgctgttactaatcctgttacgagatgaatctcatttcaccaaaattaaattatgtttttccgctaaaatgatgatacaagttgaagacacatcactctgaaattggaagacctcaccacttaaggctccacagtggcttactcagctgaactctagcagtgtatgtttgaaacagccaaagatggcgatgaaccaagtgtaaattgatctaagcagcccatgcagtttgtgttgaatcaacaaacagtgtattgttgaagtgaaattattttctgaaatgacttgttagaccagttttgaggacatactcaaaagtagagtaataatggctcctgggatggagaaatatgagatgaacctggaacattctattatggtgccacaaaggaaatctaaaaaaaaaaaaaaaaaaaaaagtggttggctaggagcagtggcacacgcctgtgattccagcactttgggaggccgaagtgggcaggagttcaagaccagcctggccaacatagtgaaaccctgtctctactaaaaatacaaaaattagccgggtgtggtggcgggcgcctgtaatcccagcttttcaagaggctgaggcagaagaatcgcttgaacccgggagatggaggttgcagtgagct

SEQ ID NO: 720 - DNA, 5108 bp, Homo sapiens
ggcgagtgcgtcgagctcgccgcggactcaagatggcggcgtgtggacgtgtacggaggatgttccgcttgtcggcggcgctgcatctgctgctgctattcgcggccggggccgagaaactccccggccagggcgtccacagccagggccagggtcccggggccaactttgtgtccttcgtagggcaggccggaggcggcggcccggcgggtcagcagctgccccagctgcctcagtcatcgcagcttcagcagcaacagcagcagcagcaacagcaacagcagcctcagccgccgcagccgcctttcccggcgggtgggcctccggcccggcggggaggagcgggggctggtgggggctggaagctggcggaggaagagtcctgcagggaggacgtgacccgcgtgtgccctaagcacacctggagcaacaacctggcggtgctcgagtgcctgcaggatgtgagggagcctgaaaatgaaatttcttcagactgcaatcatttgttgtggaattataagctgaacctaactacagatcccaaatttgaatctgtggccagagaggtttgcaaatctactataacagagattaaagaatgtgctgatgaaccggttggaaaaggttacatggtttcctgcttggtggatcaccgaggcaacatcactgagtatcagtgtcaccagtacattaccaagatgacggccatcatttttagtgattaccgtttaatctgtggcttcatggatgactgcaaaaatgacatcaacattctgaaatgtggcagtattcggcttggagaaaaggatgcacattcacaaggtgaggtggtatcatgcttggagaaaggcctggtgaaagaagcagaagaaagagaacccaagattcaagtttctgaactctgcaagaaagccattctccgggtggctgagctgtcatcggatgactttcacttagaccggcatttatattttgcttgccgagatgatcgggagcgtttttgtgaaaatacacaagctggtgagggcagagtgtataagtgcctctttaaccataaatttgaagaatccatgagtgaaaagtgtcgagaagcacttacaacccgccaaaagctgattgcccaggattataaagtcagttattcattggccaaatcctgtaaaagtgacttgaagaaataccggtgcaatgtggaaaaccttccgcgatcgcgtgaagccaggctctcctacttgttaatgtgcctggagtcagctgtacacagagggcgacaagtcagcagtgagtgccagggggagatgctggattaccgacgcatgttgatggaagacttttctctgagccctgagatcatcctaagctgtcggggggagattgaacaccattgttccggattacatcgaaaagggcggaccctacactgtctgatgaaagtagttcgaggggagaaggggaaccttggaatgaactgccagcaggcgcttcaaacactgattcaggagactgaccctggtgcagattaccgcattgatcgagctttgaatgaagcttgtgaatctgtaatccagacagcctgcaaacatataagatctggagacccaatgatcttgtcgtgcctgatggaacatttatacacagagaagatggtagaagactgtgaacaccgtctcttagagctgcagtatttcatctcccgggattggaagctggaccctgtcctgtaccgcaagtgccagggagacgcttctcgtctttgccacacccacggttggaatgagaccagtgaatttatgcctcagggagctgtgttctcttgtttatacagacacgcctaccgcactgaggaacagggaaggaggctctcacgggagtgccgagctgaagtccaaaggatcctacaccagcgtgccatggatgtcaagctggatcctgccctccaggataagtgcctgattgatctgggaaaatggtgcagtgagaaaacagagactggacaggagctggagtgccttcaggaccatctggatgacttggtggtggagtgtagagatatagttggcaacctcactgagttagaatcagaggatattcaaatagaagccttgctgatgagagcctgtgagcccataattcagaacttctgccacgatgtggcagataaccagatagactctggggacctgatggagtgtctgatacagaacaaacaccagaaggacatgaacgagaagtgtgccatcggagttacccacttccagctggtgcagatgaaggattttcggttttcttacaagtttaaaatggcctgcaaggaggacgtgttgaagctttgcccaaacataaaaaagaaggtggacgtggtgatctgcctgagcacgaccgtgcgcaatgacactctgcaggaagccaaggagcacagggtgtccctgaagtgccgcaggcagctccgtgtggaggagctggagatgacggaggacatccgcttggagccagatctatacgaagcctgcaagagtgacatcaaaaacttctgttccgctgtgcaatatggcaacgctcagattatcgaatgtctgaaagaaaacaagaagcagctaagcacccgctgccaccaaaaagtatttaagctgcaggagacagagatgatggacccagagctagactacaccctcatgagggtctgcaagcagatgataaagaggttctgtccggaagcagattctaaaaccatgttgcagtgcttgaagcaaaataaaaacagtgaattgatggatcccaaatgcaaacagatgataaccaagcgccagatcacccagaacacagattaccgcttaaaccccatgttaagaaaagcctgtaaagctgacattcctaaattctgtcacggtatcctgactaaggccaaggatgattcagaattagaaggacaagtcatctcttgcctgaagctgagatatgctgaccagcgcctgtcttcagactgtgaagaccagatccgaatcattatccaggagtccgccctggactaccgcctggatcctcagctccagctgcactgctcagacgagatctccagtctatgtgctgaagaagcagcagcccaagagcagacaggtcaggtggaggagtgcctcaaggtcaacctgctcaagatcaaaacagaattgtgtaaaaaggaagtgctaaacatgctgaaggaaagcaaagcagacatctttgttgacccggtacttcatactgcttgtgccctggacattaaacaccactgcgcagccatcacccctggccgcgggcgtcaaatgtcctgtctcatggaagcactggaggataagcgggtgaggttacagcccgagtgcaaaaagcgcctcaatgaccggattgagatgtggagttacgcagcaaaggtggccccagcagatggcttctctgatcttgccatgcaagtaatgacgtctccatctaagaactacattctctctgtgatcagtgggagcatctgtatattgttcctgattggcctgatgtgtggacggatcaccaagcgagtgacacgagagctcaaggacaggtagagccaccttgaccaccaaaggaactacctatccagtgcccagtttgtacagccctcttgtatagcatccccactcacctcgctcttctcagaagtgacaccaaccccgtgttagagcattagcagatgtccactgcgttgtcccatccagcctccactcgtgtccatggtgtcctcctcctcctcaccgtgcagcagcagcagctggtcgctggggttactgcctttgtttggcaaacttgggtttacctgcctgtagacaagtctctctcataccaacagaacttccggtacttccagaaccaactcacctgacctgcaactcaaaggcttttttaagaaaaccaccaaaaaaaaaaatttttttaaagaaaaaaatgtatatagtaacgcatctcctccaggcttgatttgggcaatggggttatgtctttcatatgactgtgtaaaacaaagacaggacttggaggggaagcacaccacccagtgtgccatgactgaggtgtctcgttcatctctcagaagcaccttggggcctcgccagggccgtggtcttcaccgaggcgtgggtgggcagccgttccccaggctgtccatgggtatttctgtggtctcctcgcttcattgaagcaaagcatgagccttcctagacaagggcagctggggaggggaagggaccggaagtttgtgaagttgaacagtccatccatctgcactgagaggctggatcctgagtcccggggcagcaggatcccaggaaccttcctcctccagggcagcacaggactcagccatgtctggaccggccctgctgaggctacagtcactctggaagctctgcgcttcatcaggaggcaggactgtggcgggaggggtccttgaagatgggtgtggggagcagtgggtcaggaagtgggagccagaggtttgactcactttgctttatttttcaggctacaatacaggtcagagacaatggcttataaaggtttagtgtggtctcaggatgtgacaggcagtccagcctgacctttctgcacactccagacaaacttcccagacaagctcctttgtgcctctacgtggagagggtgtggaaagttatcacattaaaagatggaggatttgctctgttttttttctttctgtccatttgctgcgtgtacccactctagtaggcattggctaaatgttgtattttggcgattcatcaacctttgcagaatatgggctttatagaagcaatattcttggccatcccgcctcattcctccagtgtggagatgacaagtctgggtgtgagagggaggggtccgggcatcatggttcagcgtggcactcctttggttgagtttggggcatgagatcacagtggctgcacaagagagcagtgtgtacagtaggagagacatttatgtaatatatattttattaacctgttagatgtccacaaagtattataaatcacgtgcctaaaactgtccatgtagaccaaggcctgccctcggcgccccccactcttgcctctgctctgcac

SEQ ID NO: 721 - DNA, 3901 bp, Homo sapiens
aagatggcggcgtgtggacgtgtacggaggatgttccgcttgtcggcggcgctgcatctgctgctgctattcgcggccggggccgagaaactccccggccatggcgtccacagccagggccagggtcccggggccaactttgtgtccttcgtagggcaggccggaggcggcggcccggcgggtcagcagctgccccagctgcttcagtcatcgcagcttcagcagcaacagcagcagcagcaacagcaacagcagcttcagccgccgcagccgcctttcccggcgggtgggcctccggcccggcggggaggagcgggggctggtgggggctggaagctggcggaggaagagtcctgcagggaggacgtgacccgcgtgtgccctaagcacacctggagcaacaacctggcggtgctcgagtgcctgcaggatgtgagggagcctgaaaatgaaatttcttcagactgcaatcatttgttgtggaattataagctgaacctaactacagatcccaaatttgaatctgtggccagagaggtttgcaaatctactataacagagattaaagaatgtgctgatgaaccggttggaaaaggttacatggtttcctgcttagtggatcaccgaggcaacatcactgagtatcagtgtcaccagtacattaccaagatgacggccatcatttttagtgattaccgtttaatctgtggcttcatggatgactgcaaaaatgacatcaacattctgaaatgtggcagtattcggcttggagaaaaggatgcacattcacaaggtgaggtggtatcatgcttggagaaaggcctggtgaaagaagcagaagaaagagaacccaagattcaagtttctgaactctgcaagaaagccattctccgggtggctgagctgtcatcggatgactttcacttagaccggcatttatattttgcttgccgagatgatcgggagcgtttttgtgaaaatacacaagctggtgagggcagagtgtataagtgcctctttaaccataaatttgaagaatccatgagtgaaaagtgtcgagaagcacttacaacccgccaaaagctgattgcccaggattataaagtcagttattcattggccaaatcctgtaaaagtgacttgaagaaataccggtgcaatgtggaaaaccttccgcgatcgcgtgaagccaggctctcctacttgttaatgtgcctggagtcagctgtacacagagggcgacaagtcagcagtgagtgccagggggagatgctggattaccgacgcatgttgatggaagacttttctctgagccctgagatcatcctaagctgtcggggggagattgaacaccattgttccggattacatcgaaaagggcggaccctacactgtctgatgaaagtagttcgaggggagaaggggaaccttggaatgaactgccagcaggcgcttcaaacactgattcaggagactgaccctggtgcagattaccgcattgatcgagctttgaatgaagcttgtgaatctgtaatccagacagcctgcaaacatataagatctggagacccaatgatcttgtcgtgcctgatggaacatttatacacagagaagatggtagaagactgtgaacaccgtctcttagagctgcagtatttcatctcccgggattggaagctggaccctgtcctgtaccgcaagtgccagggagacgcttctcgtctttgccacacccacggttggaatgagaccagtgaatttatgcctcagggagctgtgttctcttgtttatacagacacgcctaccgcactgaggaacagggaaggaggctctcacgggagtgccgagctgaagtccaaaggatcctacaccagcgtgccatggatgtcaagctggatcctgccctccaggataagtgcctgattgatctgggaaaatggtgcagtgagaaaacagagactggacaggagctggagtgccttcaggaccatctggatgacttggtggtggagtgtagagatatagttggcaacctcactgagttagaatcagaggatattcaaatagaagccttgctgatgagagcctgtgagcccataattcagaacttctgccacgatgtggcagataaccagatagactctggggacctgatggagtgtctgatacagaacaaacaccagaaggacatgaacgagaagtgtgccatcggagttacccacttccagctggtgcagatgaaggattttcggttttcttacaagtttaaaatggcctgcaaggaggacgtgttgaagctttgcccaaacataaaaaagaaggtggacgtggtgatctgcctgagcacgaccgtgcgcaatgacactctgcaggaagccaaggagcacagggtgtccctgaagtgccgcaggcagctccgtgtggaggagctggagatgacggaggacatccgcttggagccagatctatacgaagcctgcaagagtgacatcaaaaacttctgttccgctgtgcaatatggcaacgctcagattatcgaatgtctgaaagaaaacaagaagcagctaagcacccgctgccaccaaaaagtatttaagctgcaggagacagagatgatggacccagagctagactacaccctcatgagggtctgcaagcagatgataaagaggttctgtccggaagcagattctaaaaccatgttgcagtgcttgaagcaaaataaaaacagtgaattgatggatcccaaatgcaaacagatgataaccaagcgccagatcacccagaacacagattaccgcttaaaccccatgttaagaaaagcctgtaaagctgacattcctaaattctgtcacggtatcctgactaaggccaaggatgattcagaattagaaggacaagtcatctcttgcctgaagctgagatatgctgaccagcgcctgtcttcagactgtgaagaccagatccgaatcattatccaggagtccgccctggactaccgcctggatcctcagctccagctgcactgctcagacgagatctccagtctatgtgctgaagaagcagcagcccaagagcagacaggtcaggtggaggagtgcctcaaggtcaacctgctcaagatcaaaacagaattgtgtaaaaaggaagtgctaaacatgctgaaggaaagcaaagcagacatctttgttgacccggtacttcatactgcttgtgccctggacattaaacaccactgcgcagccatcacccctggccgcgggcgtcaaatgtcctgtctcatggaagcactggaggataagcgggtgaggttacagcccgagtgcaaaaagcgcctcaatgaccggattgagatgtggagttacgcagcaaaggtggccccagcagatggcttctctgatcttgccatgcaagtaatgacgtctccatctaagaactacattctctctgtgatcagtgggagcatctgtatattgttcctgattggcctgatgtgtggacggatcaccaagcgagtgacacgagagctcaaggacaggtagagccaccttgaccaccaaaggaactacctatccagtgcccagtttgtacagccctcttgtatagcatccccactcacctcgctcttctcagaagtgacaccaaccccgtgttagagcattagcagatgtccactgcgttgtcccatccagcctccactcgtgtccatggtgtcctcctcctcctcaccgtgcagcagcagcagctggtcgctggggttactgcctttgtttggcaaacttgggtttacctgcctgtagacaagtctctctcataccaacagaacttccggtacttccagaaccaactcacctgacctgcaactcaaaggcttttttaagaaaaccaccaaaaaaaaaa

SEQ ID NO: 722 - DNA, 3909 bp, Homo sapiens
ggcacgaggctcgccgcggactcaagatggcggcgtgtggacgtgtacggaggatgttccgcttgtcggcggcgctgcatctgctgctgctattcgcggccgggggcagaaactccccggccagggcgtcccacagccagggccagggtcccggggccaactttgtgtccttcgtagggcaggccggaggcggcggcccggcgggtcagcagctgccccagctgcctcagtcatcgcagcttcagcagcaacagcagcagcagcaacagcaacagcagcctcagccgccgcagccgcctttcccggcgggtgggcctccgcggcggggaggagcgggggctggtgggggctggaagctggcggaggaagagtcctgcagggaggacgtgacccgcgtgtgccctaagcacacctggagcaacaacctggcggtgctcgagtgcctgcaggatgtgagggagcctgaaaatgaaatttcttcagactgcaatcatttgttgtggaattataagctgaacctaactacagatcccaaatttgaatctgtggccagagaggtttgcaaatctactataacagagattaaagaatgtgctgatgaaccggttggaaaaggttacatggtttcctgcttagtggatcaccgaggcaacatcactgagtatcagtgtcaccagtacattaccaagatgacggccatcatttttagtgattaccgtttaatctgtggcttcatggatgactgcaaaaatgacatcaacattctgaaatgtggcagtattcggcttggagaaaaggatgcacattcacaaggtgaggtggtatcatgcttggagaaaggcctggtgaaagaagcagaagaaagagaacccaagattcaagtttctgaactctgcaagaaagccattctccgggtggctgagctgtcatcggatgactttcacttagaccggcatttatattttgcttgccgagatgatcgggagcgtttttgtgaaaatacacaagctggtgagggcagagtgtataagtgcctctttaaccataaatttgaagaatccatgagtgaaaagtgtcgagaagcacttacaacccgccaaaagctgattgcccaggattataaagtcagttattcattggccaaatcctgtaaaagtgacttgaagaaataccggtgcaatgtggaaaaccttccgcgatcgcgtgaagccaggctctcctacttgttaatgtgcctggagtcagctgtacacagagggcgacaagtcagcagtgagtgccagggggagatgctggattaccgacgcatgttgatggaagacttttctctgagccctgagatcatcctaagctgtcggggggagattgaacaccattgttccggattacatcgaaaaggacggaccctacactgtctgatgaaggtagttcgaggggagaaggggaaccttggaatgaactgccagcaggcgcttcaaacactgattcaggagactgaccctggtgcagattaccgcattgatcgagctttgaatgaagcttgtgaatctgtaatccagacagcctgcaaacatataagatctggagacccaatgatctcgtcgtgcctgatggaacatttatacacagagaagatggtagaagactgtgaacaccgtctcttagagctgcagtatttcatctcccgggattggaagctggaccctgtcctgtaccgcaagtgccagggagacgcttctcgtctttgccacacccacggttggaatgagaccagtgaatttatgcctcagggagctgtgttctcttgtttatacagacacgcctaccgcactgaagaacagggaaggaggctctcacgggagtgccgagctgaagtccaaaggatcctacaccagcgtgccatggatgtcaagctggatcctgccctccaggataagtgcctgattgatctgggaaaatggtgcagtgagaaaacagagactggacaggagctggagtgccttcaggaccatctggatgacttggtggtggagtgtagagatatagttggcaacctcactgagttagaatcagaggatatccaaatagaagccttgctgatgagagcctgtgagcccataattcagacattctgccacgatgcggataaccagatagactctggggacctgatggagtgtctgatacagaacaaacaccagaaggacatgaacgagaagtgtgccatcggagttacccacttccagctggtgcagatgaaggattttcggttttcttacaagtttaaaatggcctgcaaggaggacgtgttgaagctttgcccaaacataaaaaagaaggtggacgtggtgatctgcctgagcacgaccgtgcgcaatgacactctgcaggaagccaaggagcacagggtgtccctgaagtgccgcaggcagctccgtgtggaggagctggagatgacggaggacatccgcttggagccagatctatacgaagcctgcaagagtgacatcaaaaacttctgttccgctgtgcaatatggcaacgctcagattatcgaatgtctgaaagaaaacaagaagcagctaagcacccgctgccaccaaaaagtatttaagctgcaggagacagagatgatggacccagagctagactacaccctcatgagggtctgcaagcagatgataaagaggttctgtccggaagcagattctaaaaccatgttgcagtgcttgaagcaaaataaaaacagtgaattgatggatcccaaatgcaaacagatgataaccaagcgccagatcacccagaacacagattaccgcttaaaccccatgttaagaaaagcctgtaaagctgacattcctaaattctgtcacggtatcctgactaaggccaaggatgattcagaattagaaggacaagtcatctcttgcctgaagctgagatatgctgaccagcgcctgtcttcagactgtgaagaccagatccgaatcattatccaggagtccgccctggactaccgcctggatcctcagctccagctgcactgctcagacgagatctccagtctatgtgctgaagaagcagcagcccaagagcagacaggtcaggtggaggagtgcctcaaggtcaacctgctcaagatcaaaacagaattgtgtaaaaaggaagtgctaaacatgctgaaggaaagcaaagcagacatctttgttgacccggtacttcatactgcttgtgccctggacattaaacaccactgcgcagcactcacccctggccgcgggcgtcaaatgtcctgtctcatggaagcactggaggataagcgggtgaggttacagcccgagtgcaaaaagcgcctcaatgaccggattgagatgtggagttacgcagcaaaggtggccccagcagatggcttctctgatcttgccatgcaagtaatgacgtctccatctaagaactacattctctctgtgatcagtgggagcatctgtatattgttcctgattggcctgatgtgtggacggatcaccaagcgagtgacacgagagctcaaggacaggtagagccaccttgaccaccaaaggaactacctatccagtgcccagtttgtacagccctcttgtatagcatccccactcacctcgctcttctcagaagtgacaccaaccccgtgttagagcattagcagatgtccactgcgttgtcccatccagcctccactcgtgtccatggtgtcctcctcctcctcaccgtgcagcagcagcagctggtcgctggggttactgcctttgtttggcaaacttgggtttacctgcctgtagacaagtctctctcataccaacagaacttccggtacttccagaaccaactcacctgacctgcaactcaaaggcttttttaagaaaaccacca

SEQ ID NO: 723 - DNA, 5191 bp, Homo sapiens
ggcgagtgcgtcgagctcgccgcggactcaagatggcggcgtgtggacgtgtacggaggatgttccgcttgtcggcggcgctgcatctgctgctgctattcgcggccggggccgagaaactccccggccagggcgtccacagccagggccagggtcccggggccaactttgtgtccttcgtagggcaggccggaggcggcggcccggcgggtcagcagctgccccagctgcctcagtcatcgcagcttcagcagcaacagcagcagcagcaacagcaacagcagcctcagccgccgcagccgcctttcccggcgggtgggcctccggcccggcggggaggagcgggggctggtgggggctggaagctggcggaggaagagtcctgcagggaggacgtgacccgcgtgtgccctaagcacacctggagcaacaacctggcggtgctcgagtgcctgcaggatgtgagggagcctgaaaatgaaatttcttcagactgcaatcatttgttgtggaattataagctgaacctaactacagatcccaaatttgaatctgtggccagagaggtttgcaaatctactataacagagattaaagaatgtgctgatgaaccggttggaaaaggttacatggtttcctgcttggtggatcaccgaggcaacatcactgagtatcagtgtcaccagtacattaccaagatgacggccatcatttttagtgattaccgtttaatctgtggcttcatggatgactgcaaaaatgacatcaacattctgaaatgtggcagtattcggcttggagaaaaggatgcacattcacaaggtgaggtggtatcatgcttggagaaaggcctggtgaaagaagcagaagaaagagaacccaagattcaagtttctgaactctgcaagaaagccattctccgggtggctgagctgtcatcggatgactttcacttagaccggcatttatattttgcttgccgagatgatcgggagcgtttttgtgaaaatacacaagctggtgagggcagagtgtataagtgcctctttaaccataaatttgaagaatccatgagtgaaaagtgtcgagaagcacttacaacccgccaaaagctgattgcccaggattataaagtcagttattcattggccaaatcctgtaaaagtgacttgaagaaataccggtgcaatgtggaaaaccttccgcgatcgcgtgaagccaggctctcctacttgttaatgtgcctggagtcagctgtacacagagggcgacaagtcagcagtgagtgccagggggagatgctggattaccgacgcatgttgatggaagacttttctctgagccctgagatcatcctaagctgtcggggggagattgaacaccattgttccggattacatcgaaaagggcggaccctacactgtctgatgaaagtagttcgaggggagaaggggaaccttggaatgaactgccagcaggcgcttcaaacactgattcaggagactgaccctggtgcagattaccgcattgatcgagctttgaatgaagcttgtgaatctgtaatccagacagcctgcaaacatataagatctggagacccaatgatcttgtcgtgcctgatggaacatttatacacagagaagatggtagaagactgtgaacaccgtctcttagagctgcagtatttcatctcccgggattggaagctggaccctgtcctgtaccgcaagtgccagggagacgcttctcgtctttgccacacccacggttggaatgagaccagtgaatttatgcctcagggagctgtgttctcttgtttatacagacacgcctaccgcactgaggaacagggaaggaggctctcacgggagtgccgagctgaagtccaaaggatcctacaccagcgtgccatggatgtcaagctggatcctgccctccaggataagtgcctgattgatctgggaaaatggtgcagtgagaaaacagagactggacaggagctggagtgccttcaggaccatctggatgacttggtggtggagtgtagagatatagttggcaacctcactgagttagaatcagaggatattcaaatagaagccttgctgatgagagcctgtgagcccataattcagaacttctgccacgatgtggcagataaccagatagactctggggacctgatggagtgtctgatacagaacaaacaccagaaggacatgaacgagaagtgtgccatcggagttacccacttccagctggtgcagatgaaggattttcggttttcttacaagtttaaaatggcctgcaaggaggacgtgttgaagctttgcccaaacataaaaaagaaggtggacgtggtgatctgcctgagcacgaccgtgcgcaatgacactctgcaggaagccaaggagcacagggtgtccctgaagtgccgcaggcagctccgtgtggaggagctggagatgacggaggacatccgcttggagccagatctatacgaagcctgcaagagtgacatcaaaaacttctgttccgctgtgcaatatggcaacgctcagattatcgaatgtctgaaagaaaacaagaagcagctaagcacccgctgccaccaaaaagtatttaagctgcaggagacagagatgatggacccagagctagactacaccctcatgagggtctgcaagcagatgataaagaggttctgtccggaagcagattctaaaaccatgttgcagtgcttgaagcaaaataaaaacagtgaattgatggatcccaaatgcaaacagatgataaccaagcgccagatcacccagaacacagattaccgcttaaaccccatgttaagaaaagcctgtaaagctgacattcctaaattctgtcacggtatcctgactaaggccaaggatgattcagaattagaaggacaagtcatctcttgcctgaagctgagatatgctgaccagcgcctgtcttcagactgtgaagaccagatccgaatcattatccaggagtccgccctggactaccgcctggatcctcagctccagctgcactgctcagacgagatctccagtctatgtgctgaagaagcagcagcccaagagcagacaggtcaggtggaggagtgcctcaaggtcaacctgctcaagatcaaaacagaattgtgtaaaaaggaagtgctaaacatgctgaaggaaagcaaagcagacatctttgttgacccggtacttcatactgcttgtgccctggacattaaacaccactgcgcagccatcacccctggccgcgggcgtcaaatgtcctgtctcatggaagcactggaggataagcgggtgaggttacagcccgagtgcaaaaagcgcctcaatgaccggattgagatgtggagttacgcagcaaaggtggccccagcagatggcttctctgatcttgccatgcaagtaatgacgtctccatctaagaactacattctctctgtgatcagtgggagcatctgtatattgttcctgattggcctgatgtgtggacggatcaccaagcgagtgacacgagagctcaaggacaggtagagccaccttgaccaccaaaggaactacctatccagtgcccagtttgtacagccctcttgtatagcatccccactcacctcgctcttctcagaagtgacaccaaccccgtgttagagcattagcagatgtccactgcgttgtcccatccagcctccactcgtgtccatggtgtcctcctcctcctcaccgtgcagcagcagcagctggtcgctggggttactgcctttgtttggcaaacttgggtttacctgcctgtagacaagtctctctcataccaacagaacttccggtacttccagaaccaactcacctgacctgcaactcaaaggcttttttaagaaaaccaccaaaaaaaaaaatttttttaaagaaaaaaatgtatatagtaacgcatctcctccaggcttgatttgggcaatggggttatgtctttcatatgactgtgtaaaacaaagacaggacttggaggggaagcacaccacccagtgtgccatgactgaggtgtctcgttcatctctcagaagcaccttggggcctcgccagggccgtggtcttcaccgaggcgtgggtgggcagccgttccccaggctgtgtggggtcctgctttcttctgctgagacagtgacgctttccagtttccaccctaatcagccactgctggtcacagccccacagccatgggtatttctgtggtctcctcgcttcattgaagcaaagcatgagccttcctagacaagggcagctggggaggggaagggaccggaagtttgtgaagttgaacagtccatccatctgcactgagaggctggatcctgagtcccggggcagcaggatcccaggaaccttcctcctccagggcagcacaggactcagccatgtctggaccggccctgctgaggctacagtcactctggaagctctgcgcttcatcaggaggcaggactgtggcgggaggggtccttgaagatgggtgtggggagcagtgggtcaggaagtgggagccagaggtttgactcactttgctttatttttcaggctacaatacaggtcagagacaatggcttataaaggtttagtgtggtctcaggatgtgacaggcagtccagcctgacctttctgcacactccagacaaacttcccagacaagctcctttgtgcctctacgtggagagggtgtggaaagttatcacattaaaagatggaggatttgctctgttttttttctttctgtccatttgctgcgtgtacccactctagtaggcattggctaaatgttgtattttggcgattcatcaacctttgcagaatatgggctttatagaagcaatattcttggccatcccgcctcattcctccagtgtggagatgacaagtctgggtgtgagagggaggggtccgggcatcatggttcagcgtggcactcctttggttgagtttggggcatgagatcacagtggctgcacaagagagcagtgtgtacagtaggagagacatttatgtaatatatattttattaacctgttagatgtccacaaagtattataaatcacgtgcctaaaactgtccatgtagaccaaggcctgccctcggcgccccccactcttgcctctgctctgcac

SEQ ID NO: 724 - DNA, 1677 bp, Homo sapiens
gtggcacatccacacatgagggaaaaacactgccaggacatctcagggcactctcaggaaatgaggaagctgctggagaagtttctagccttggggcaggcagagtggctcctcacagcctgaagctcatccttctgcacgggccagccaggccagcacagaggcaccagggcagcagtgcacacaggtccccggggaccccaccatgtggagcggatggtggctgtggccccttgtggccgtctgcactgcagacttctttcgggacgaggcagagaggatcatgagggactcccctgtcattgatgggcacaatgacctcccctggcagctgctggatatgttcaacaaccggctgcaggacgagagggccaacctgaccaccttggccggcacacacaccaacatccccaagctgagggccggctttgtgggaggccagttctggtccgtgtacacgccctgcgacacccagaacaaagacgccgtgcggaggacgctggagcagatggacgtggtccaccgcatgtgccggatgtacccggagaccttcctgtatgtcaccagcagtgcaggcattcggcaggccttccgggaagggaaggtggccagcctgatcggcgtggagggcggccactccattgacagcagtttgggcgtcctgcgggcactctatcagctgggcatgcggtacctgaccctcacccacagctgcaacacgccctgggctgacaactggctggtggacacgggagacagcgagccccagagccaaggcttgtcaccctttgggcagcgtgtggtgaaggagctgaaccgtctgggggtcctcatcgacttggctcacgtgtctgtggccaccatgaaggccaccctgcagctgtccagagccccggtcatcttcagccactcctcggcctacagcgtgtgcgcaagccggcgcaacgtgcctgacgacgtcctgaggctggtgaaacagacagacagcctggtgatggtgaacttctacaacaattacatttcctgcaccaacaaggccaacctgtcccaagtggccgaccatctggatcacatcaaggaggtggcaggagccagagccgtgggttttggtggggactttgatggtgttccaagggtccctgaggggctggaggacgtctccaagtatccagacctgatcgctgagctgctcaggaggaactggacggaggcggaggtcaagggcgcactggctgacaacctgctgagggtcttcgaggctgtggaacaggccagcaacctcacacaggctcccgaggaggagcccatcccgctggaccagctgggtggctcctgcaggacccattacggctactcctctggggcttccagcctccatcgccactgggggctcctgctggcctccctcgctcccctggtcctctgtctgtctctcctgtgaaacctgggagaccagagtcccctttagggttcccggagctccgggaagacccgcccatcccaggactccagatgccaggagccctgctgcccacatgcaaggaccagcatctcctgagaggacgcctgggcttacctggggggcaggatgcctggggacagttcaggacacacacacagtaggcccgcaataaaagcaacaccccttcacatcctggggtacgtgtcatcggcatc

SEQ ID NO: 725 - DNA, 3570 bp, Homo sapiens
acagtgctgggattccaggcgtgagccaccgcgcccggccgggggtcacagttgttagaatctgttacgggacccaccttcatcccttgcccaccaccagcgacacaggggcaggaagtatcttcaacccaaatggctgtgttccccctaaaagcggggggttttaaactcacaaaggaaaaggaggagaatggatcctcactcagccaccagctctgacagccccagctcccccttcctctgcgttccccttccttctcctttccccttccttctcatttttcctcacgagagctcctaccctcaccaccaccagctcctgggaaaaccttggagaacttcagtcctttggaagtttagaaggatctgattggagtttgggtgcagggctcttccctggggacagaggcagcagagaggcctgggtagcccccaaagcctgtactcgacaccctgctccccaggaggatggtggtcccaggccccccaaggtcaggacgttccaattacccaggcacccaccatattccccaagaggcaatttgatctttaaactgaaaactctcagaaacagtatcacccccaggcccttgcccctcacgtctccaatcctgtccactgaggtcaattggctccttgtgtcccaccctcagacaatgtgtctgccccccagcctcctcaacagaaaaagcccctggaagggatgggctacccagctccctgagctcctggctcggggttccctcccctgggggtgggcacagttgggaaatgcagcctgcacaggtgtgttcaggtggccggtgatatgtcacccccgcggcctagacttcagtcctgcgtctgtcgtgaggagtaggaagtggggagagcagcccagaggccaggagctcggaagcccccaggtcccagtggccgccctgactgcctggcctctccccggcaaactccaggcacaatgacctcccctggcagctgctggatatgttcaacaaccggctgcaggacgagagggccaacctgaccaccttggccggcacacacaccaacatccccaagctgagggccggctttgtgggaggccaggtaccgcctgccctgccttgtgcttgccctgtgtggggtcatcccgtctcctacctcaggcctggctacagtgggaccatccctgtggtgttcctccagggtccctcggtgcccaggccgagggagggcttcccagcgggtgggaaaccagactcccacaggcatgcggggggtgggctgagacctggctgcatcagctcctggcaccccctgcggcccacagttctggtccgtgtacacgccctgcgacacccagaacaaagacgccgtgcggaggacgctggagcagatggacgtggtccaccgcatgtgccggatgtacccggagaccttcctgtatgtcaccagcagtgcaggtggggtcctgacctgggtcctccaggtcctgcgtcttctcacccagccctcatcctgagcagcaggtgccggtcaggacacctcaccctccagataccaggtgcccactcccctgcaccctgactctccccgcaggcattcggcaggccttccgggaagggaaggtggccagcctgatcggcgtggagggcggccactccattgacagcagtttgggcgtcctgcgggcactctatcagctgggcatgcggtacctgaccctcacccacagctgcaacacgccctggtgcgtgactccccatgggaggcccccgggctgtggtcaggagggagggggcagacactccctgccaccctccagagcccatcccctctggctgtgagtcccaggccgggcctcgcctgctgggctgatgggaggccgagaccaccgctcacctcttgggcacctgccttttggttctccagggctgacaactggctggtggacacgggagacagcgagccccagagccaaggcttgtcaccctttgggcaggtgagtggggtgggagcggccagtcacccccgaggagaaggcagaggccctggagggtgaccagaacaatgcatctcctcacgtgggacctcagtgtccttgtctgtaaaatggagctggcagccatccccccagggtgggtgctgagccctgagtggccccggacttccagccacgaaggatgatgactcacatctggtccagcccgtccacctccgcagccccgaccctgggggctgtgagggtggacggagccctgtcttcccagcgtgtggtgaaggagctgaaccgtctgggggtcctcatcgacttggctcacgtgtctgtggccaccatgaaggccaccctgcagctgtccagagccccggtcatcttcagccactcctcggcctacagcgtgtgcgcaagccggcgcaacgtgcctgacgacgtcctgaggctggtggtgagggccgagggggcgacctccaccccgcctccctgggcaggccctcccagctctcagcttcaccctgtcttccttcttgtgcagaaacagacagacagcctggtgatggtgaacttctacaacaattacatttcctgcaccaacaaggccaacctgtcccaagtggccggtaggtggggtgtgagcggccaagggggccgaagggggagggcctcactcgggacccatacctgctgctccctggacagaccatctggatcacatcaaggaggtggcaggagccagagccgtgggttttggtggggactttgatggtgttccaaggtaaggggctgagagctctgtcctgtggatgagccgggaggttcatggcctcgtcagagggatgaggtggctggaggagggacctgtgtcctagtgtgggggcccaggttctcctggcctcaacacagggtccctgaggggctggaggacgtctccaagtatccagacctgatcgctgagctgctcaggaggaactggacggaggcggaggtcaagggcgcactggctgacaacctgctgagggtcttcgaggctgtggaacaggtgaggatggggtgaccgcctgagtctccccccccaccaccagcagacagactgccccacccgtgtctgtctgtccccaggccagcaacctcacacaggctcccgaggaggagcccatcccgctggaccagctgggtggctcctgcaggacccattacggctactcctctggggcttccagcctccatcgccactgggggctcctgctggcctccctcgctcccctggtcctctgtctgtctctcctgtgaaacctgggagaccagagtcccctttagggttcccggagctccgggaagacccgcccatcccaggactccagatgccaggagccctgctgcccacatgcaaggaccagcatctcctgagaggacgcctgggcttacctggggggcaggatgcctggggacagttcaggacacacacacagtaggcccgcaataaaagcaacaccccttcacatcctggggtacgtgtcatcggcatccggctcaggaggtggggtgttttgtgaaaattgctcctggttggacgtggggcactcctgtgatcc

SEQ ID NO: 726 - DNA, 1767 bp, Homo sapiens
ccctggggtactgtgcgagccctcaaggaggtggctgttctgtagctggagagctccgtgggtggcaggactgaacttgaacaccagaaacaacccccaagccttgtgacctgggaggcaggaggcgggtctgtctccctgggacttgggtggctgagccgaggtactcgggaccctgtcccgcgcatggcagagtggctcctcacagcctgaagctcatccttctgcacgggccagccaggccagcacagaggcaccagggcagcagtgcacacaggtccccggggaccccaccatgtggagcggatggtggctgtggccccttgtggccgtctgcactgcagacttctttcgggacgaggcagagaggatcatgagggactcccctgtcattgatgggcacaatgacctcccctggcagctgctggatatgttcaacaaccggctgcaggacgagagggccaacctgaccaccttggccggcacacacaccaacatccccaagctgagggccggctttgtgggaggccagttctggtccgtgtacacgccctgcgacacccagaacaaagacgccgtgcggaggacgctggagcagatggacgtggtccaccgcatgtgccggatgtacccggagaccttcctgtatgtcaccagcagtgcaggcattcggcaggccttccgggaagggaaggtggccagcctgatcggcgtggagggcggccactccattgacagcagtttgggcgtcctgcgggcactctatcagctgggcatgcggtacctgaccctcacccacagctgcaacacgccctgggctgacaactggctggtggacacgggagacagcgagccccagagccaaggcttgtcaccctttgggcagcgtgtggtgaaggagctgaaccgtctgggggtcctcatcgacttggctcacgtgtctgtggccaccatgaaggccaccctgcagctgtccagagccccggtcatcttcagccactcctcggcctacagcgtgtgcgcaagccggcgcaacgtgcctgacgacgtcctgaggctggtgaaacagacagacagcctggtgatggtgaacttctacaacaattacatttcctgcaccaacaaggccaacctgtcccaagtggccgaccatctggatcacatcaaggaggtggcaggagccagagccgtgggttttggtggggactttgatggtgttccaagggtccctgaggggctggaggacgtctccaagtatccagacctgatcgctgagctgctcaggaggaactggacggaggcggaggtcaagggcgcactggctgacaacctgctgagggtcttcgaggctgtggaacaggccagcaacctcacacaggctcccgaggaggagcccatcccgctggaccagctgggtggctcctgcaggacccattacggctactcctctggggcttccagcctccatcgccactgggggctcctgctggcctccctcgctcccctggtcctctgtctgtctctcctgtgaaacctgggagaccagagtcccctttagggttcccggagctccgggaagacccgcccatcccaggactccagatgccaggagccctgctgcccacatgcaaggaccagcatctcctgagaggacgcctgggcttacctggggggcaggatgcctggggacagttcaggacacacacacagtaggcccgcaataaaagcaacaccccttcacatcctggggtacgtgtcatcggcatc

SEQ ID NO: 727 - DNA, 2416 bp, Homo sapiens
cgcgcagtcgcgcgcgggtcgtgccgtaccaccgtcgcgggcaggctcggccacgagcgccagagccccgcgcctcccctcgcggcctgtcccaagtccctgccccgcaacagagcgtcacttccgccatccccggcagcggttggggcggggcgcacgggggagggggccaggtcggagggaagcccgcccgtgcccgagcccgcgcccgagcagggactacatttcccgaggggcctcggcggcggctgcggcgacgggcgcggcaacgtcccccggaagtggagcccgggacttccactcgtgcgtgaggcgagaggagccggagacgagaccagaggccgaactcgggttctgacaagatggccgggctgccccgcaggatcatcaaggaaacccagcgtttgctggcagaaccagttcctggcatcaaagccgaaccagatgagagcaacgcccgttattttcatgtggtcattgctggccctcaggattccccctttgagggagggacttttaaacttgaactattccttccagaagaatacccaatggcagcccctaaagtacgtttcatgaccaaaatttatcatcctaatgtagacaagttgggaagaatatgtttagatattttgaaagataagtggtccccagcactgcagatccgcacagttctgctatcgatccaggccttgttaagtgctcccaatccagatgatccattagcaaatgatgtagcggagcagtggaagaccaacgaagcccaagccatagaaacagctagagcatggactaggctatatgccatgaataatatttaaattgatacgatcatcaagtgtgcatcacttctcctgttctgccaagacttcctcctctttgtttgcatttaatggacacagtcttagaaacattacagaataaaaaagcccagacatcttcagtcctttggtgattaaatgcacattagcaaatctatgtcttgtcctgattcactgtcataaagcatgagcagaggctagaagtatcatctggattgttgtgaaacgtttaaaagcagtggcccctccctgcttttattcatttcccccatcctggtttaagtataaagcactgtgaatgaaggtagttgtcaggttagctgcaggggtgtgggtgtttttattttattttattttattttatttttgaggggggaggtagtttaattttatgggctcctttcccccttttttggtgatctaattgcattggttaaaagcagctaaccaggtctttagaatatgctctagccaagtctaactttatttagacgctgtagatggacaagcttgattgttggaaccaaaatgggaacattaaacaaacatcacagccctcactaataacattgctgtcaagtgtagattccccccttcaaaaaaagcttgtgaccattttgtatggcttgtctggaaacttctgtaaatcttatgttttagtaaaatattttttgttattctactttgcctttgtacagtttattttactgtgtttatttcattttcccaatttgacaatcgtattttaaaattgaaactgatggaacattctttcttggtcttcaccatctgacaaattgaatggcaagaggtggattttgccagtttcttttcactgatgcagatttgtgttaagatagtactgaatggagtatttataaactggccctgagcatgcataaagcatcagtatctgacctttttttaaccttctaggaatttgaaataaatgtgtttgtgttgtctgattagatgatcattggtgtcttgccacaatgtttaaaaattactgtacaggaaagtcacagcaaagatagcagttgtgactgacatgtaggactttcacagttgtgccacattaacctttcatgtgtgttaagaaacactgatctgatcatttgggatttgctgaggcatttgtgagtcttccttataaacctgatgagcagatctcaactatctagcttgtgtgtcatcagaaaggtttatccctttgagagtatcaagtcctcagttaatgattcttgctttcatccctccactcgttttattctttaatttggaattcagtaatttttcttctttattgacgaattcctcccctcacaaaactgttctttcccacctctctccatatctaattcctgattcttgttatttttaagtcataaatgtagccagtcataaatacataaatgttaaccttcgggttgcaaccttgtctcttgcagtttaaggtaatggatattgtagcccatttgaattttcttcactcttattctcgtaattctggagtttcttcagattgtggtgtattttattgtgctcctatgtaagatgaagaattaactattaaaattacattttcaacatac

SEQ ID NO: 728 - DNA, 2446 bp, Homo sapiens
cgcgcagtcgcgcgcgggtcgtgccgtaccaccgtcgcgggcaggctcggccacgagcgccagagccccgcgcctcccctcgcggcctgtcccaagtccctgccccgcaacagagcgtcacttccgccatccccggcagcggttggggcggggcgcacgggggagggggccaggtcggagggaagcccgcccgtgcccgagcccgcgcccgagcagggactacatttcccgaggggcctcggcggcggctgcggcgacgggcgcggcaacgtcccccggaagtggagcccgggacttccactcgtgcgtgaggcgagaggagccggagacgagaccagaggccgaactcgggttctgacaagatggccgggctgccccgcaggatcatcaaggaaacccagcgtttgctggcagaaccagttcctggcatcaaagccgaaccagatgagagcaacgcccgttattttcatgtggtcattgctggccctcaggattccccctttgagggagggacttttaaacttgaactattccttccagaagaatacccaatggcagcccctaaagtacgtttcatgaccaaaatttatcatcctaatgtagacaagttgggaagaatatgtttagatattttgaaagataagtggtccccagcactgcagatccgcacagttctgctatcgatccaggccttgttaagtgctcccaatccagatgatccattagcaaatgatgtagcggagcagtggaagaccaacgaagcccaagccatagaaacagctagagcatggactaggctatatgccatgaataatatttaaattgatacgatcatcaagtgtgcatcacttctcctgttctgccaagacttcctcctctttgtttgcatttaatggacacagtcttagaaacattacagaataaaaaagcccagacatcttcagtcctttggtgattaaatgcacattagcaaatctatgtcttgtcctgattcactgtcataaagcatgagcagaggctagaagtatcatctggattgttgtgaaacgtttaaaagcagtggcccctccctgcttttattcatttcccccatcctggtttaagtataaagcactgtgaatgaaggtagttgtcaggttagctgcaggggtgtgggtgtttttattttattttattttattttatgggctcctttcccccttttttggtgatctaattgcattggttaaaagcagctaaccaggtctttagaatatgctctagccaagtctaactttatttagacgctgtagatggacaagcttgattgttggaaccaaaatgggaacattaaacaaacatcacagccctcactaataacattgctgtcaagtgtagattccccccttcaaaaaaagcttgtgaccattttgtatggcttgtctggaaacttctgtaaatcttatgttttagtaaaatattttttgttattctactttgcctttgtacagtttattttactgtgtttatttcattttcccaatttgacaatcgtattttaaaattgaaactgatggaacattctttcttggtcttcaccatctgacaaattgaatggcaagaggtggattttgccagtttcttttcactgatgcagatttgtgttaagatagtactgaatggagtatttataaactggccctgagcatgcataaagcatcagtatctgacctttttttaaccttctaggaatttgaaataaatgtgtttgtgttgtctgattagatgatcattggtgtcttgccacaatgtttaaaaattactgtacaggaaagtcacagcaaagatagcagttgtgactgacatgtaggactttcacagttgtgccacatttttgcctaaaatttgggttatgacatttttcttggttcttatctgaaaatttcatctgtaacctttcatgtgtgttaagaaacactgatctgatcatttgggatttgctgaggcatttgtgagtcttccttataaacctgatgagcagatctcaactatctagcttgtgtgtcatcagaaaggtttatccctttgagagtatcaagtcctcagttaatgattcttgctttcatccctccactcgttttattctttaatttggaattcagtaatttttcttctttattgacgaattcctcccctcacaaaactgttctttcccacctctctccatatctaattcctgattcttgttatttttaagtcataaatgtagccagtcataaatacataaatgttaaccttcgggttgcaaccttgtctcttgcagtttaaggtaatggatattgtagcccatttgaattttcttcactcttattctcgtaattctggagtttcttcagattgtggtgtattttattgtgctcctatgtaagatgaagaattaactattaaaattacattttcaacatac

SEQ ID NO: 729 - DNA, 2489 bp, Homo sapiens
cgcgcagtcgcgcgcgggtcgtgccgtaccaccgtcgcgggcaggctcggccacgagcgccagagccccgcgcctcccctcgcggcctgtcccaagtccctgccccgcaacagagcgtcacttccgccatccccggcagcggttggggcggggcgcacgggggagggggccaggtcggagggaagcccgcccgtgcccgagcccgcgcccgagcagggactacatttcccgaggggcctcggcggcggctgcggcgacgggcgcggcaacgtcccccggaagtggagcccgggacttccactcgtgcgtgaggcgagaggagccggagacgagaccagaggccgaactcgggttctgacaagatggccgggctgccccgcaggatcatcaaggaaacccagcgtttgctggcagaaccagttcctggcatcaaagccgaaccagatgagagcaacgcccgttattttcatgtggtcattgctggccctcaggattccccctttgagggagggacttttaaacttgaactattccttccagaagaatacccaatggcagcccctaaagtacgtttcatgaccaaaatttatcatcctaatgtagacaagttgggaagaatatgtttagatattttgaaagataagtggtccccagcactgcagatccgcacagttctgctatcgatccaggccttgttaagtgctcccaatccagatgatccattagcaaatgatgtagcggagcagtggaagaccaacgaagcccaagccatagaaacagctagagcatggactaggctatatgccatgaataatatttaaattgatacgatcatcaagtgtgcatcacttctcctgttctgccaagacttcctcctctttgtttgcatttaatggacacagtcttagaaacattacagaataaaaaagcccagacatcttcagtcctttggtgattaaatgcacattagcaaatctatgtcttgtcctgattcactgtcataaagcatgagcagaggctagaagtatcatctggattgttgtgaaacgtttaaaagcagtggcccctccctgcttttattcatttcccccatcctggtttaagtataaagcactgtgaatgaaggtagttgtcaggttagctgcaggggtgtgggtgtttttattttattttattttattttatttttgaggggggaggtagtttaattttatgggctcctttcccccttttttggtgatctaattgcattggttaaaagcagctaaccaggtctttagaatatgctctagccaagtctaactttatttagacgctgtagatggacaagcttgattgttggaaccaaaatgggaacattaaacaaacatcacagccctcactaataacattgctgtcaagtgtagattccccccttcaaaaaaagcttgtgaccattttgtatggcttgtctggaaacttctgtaaatcttatgttttagtaaaatattttttgttattctactttgcctttgtacagtttattttactgtgtttatttcattttcccaatttgacaatcgtattttaaaattgaaactgatggaacattctttcttggtcttcaccatctgacaaattgaatggcaagaggtggattttgccagtttcttttcactgatgcagatttgtgttaagatagtactgaatggagtatttataaactggccctgagcatgcataaagcatcagtatctgacctttttttaaccttctaggaatttgaaataaatgtgtttgtgttgtctgattagatgatcattggtgtcttgccacaatgtttaaaaattactgtacaggaaagtcacagcaaagatagcagttgtgactgacatgtaggactttcacagttgtgccacatttttgcctaaaatttgggttatgacatttttcttggttcttatctgaaaatttcatctgtaacctttcatgtgtgttaagaaacactgatctgatcatttgggatttgctgaggcatttgtgagtcttccttataaacctgatgagcagatctcaactatctagcttgtgtgtcatcagaaaggtttatccctttgagagtatcaagtcctcagttaatgattcttgctttcatccctccagtatttgctgtgggagctcgttttattctttaatttggaattcagtaatttttcttctttattgacgaattcctcccctcacaaaactgttctttcccacctctctccatatctaattcctgattcttgttatttttaagtcataaatgtagccagtcataaatacataaatgttaaccttcgggttgcaaccttgtctcttgcagtttaaggtaatggatattgtagcccatttgaattttcttcactcttattctcgtaattctggagtttcttcagattgtggtgtattttattgtgctcctatgtaagatgaagaattaactattaaaattacattttcaacat

SEQ ID NO: 730 - DNA, 2568 bp, Homo sapiens
cgcgcgcgcagtcgcgcgcgggtcgtgccgtaccaccgtcgcgggcaggctcggccacgagcgccagagccccgcgcctcccctcgcggcctgtcccaagtccctgccccgcaacagagcgtcacttccgccatccccggcagcggttggggcggggcgcacgggggagggggccaggtcggagggaagcccgcccgtgcccgagcccgcgcccgagcagggactacatttcccgaggggcctcggcggcggctgcggcgacgggcgcggcaacgtcccccggaagtggagcccgggacttccactcgtgcgtgaggcgagaggagccggagacgagaccagaggccgaactcgggttctgacaagatggccgggctgccccgcaggatcatcaaggaaacccagcgtttgctggcagaaccagttcctggcatcaaagccgaaccagatgagagcaacgcccgttattttcatgtggtcattgctggccctcaggattccccctttgagggagggacttttaaacttgaactattccttccagaagaatacccaatggcagcccctaaagtacgtttcatgaccaaaatttatcatcctaatgtagacaagttgggaagaatatgtttagatattttgaaagataagtggtccccagcactgcagatccgcacagttctgctatcgatccaggccttgttaagtgctcccaatccagatgatccattagcaaatgatgtagcggagcagtggaagaccaacgaagcccaagccatagaaacagctagagcatggactaggctatatgccatgaataatatttaaattgatacgatcatcaagtgtgcatcacttctcctgttctgccaagacttcctcctctttgtttgcatttaatggacacagtcttagaaacattacagaataaaaaagcccagacatcttcagtcctttggtgattaaatgcacattagcaaatctatgtcttgtcctgattcactgtcataaagcatgagcagaggctagaagtatcatctggattgttgtgaaacgtttaaaagcagtggcccctccctgcttttattcatttcccccatcctggtttaagtataaagcactgtgaatgaaggtagttgtcaggttagctgcaggggtgtgggtgtttttattttattttattttattttatttttgaggggggaggtagtttaattttatgggctcctttcccccttttttggtgatctaattgcattggttaaaagcagctaaccaggtctttagaatatgctctagccaagtctaactttatttagacgctgtagatggacaagcttgattgttggaaccaaaatgggaacattaaacaaacatcacagccctcactaataacattgctgtcaagtgtagattccccccttcaaaaaaagcttgtgaccattttgtatggcttgtctggaaacttctgtaaatcttatgttttagtaaaatattttttgttattctactttgcctttgtacagtttattttactgtgtttatttcattttcccaatttgacaatcgtattttaaaattgaaactgatggaacattctttcttggtcttcaccatctgacaaattgaatggcaagaggtggattttgccagtttcttttcactgatgcagatttgtgttaagatagtactgaatggagtatttataaactggccctgagcatgcataaagcatcagtatctgacctttttttaaccttctaggaatttgaaataaatgtgtttgtgttgtctgattagatgatcattggtgtcttgccacaatgtttaaaaattactgtacaggaaagtcacagcaaagatagcagttgtgactgacatgtaggactttcacagttgtgccacatttttgcctaaaatttgggttatgacatttttcttggttcttatctgaaaatttcatctgtaacctttcatgtgtgttaagaaacactgatctgatcatttgggatttgctgaggcatttgtgagtcttccttataaacctgatgagcagatctcaactatctagcttgtgtgtcatcagaaaggtttatccctttgagagtatcaagtcctcagttaatgattcttgctttcatccctccagtatttgctgtgggagctcgttttattctttaatttggaattcagtaatttttcttctttattgacgaattcctcccctcacaaaactgttctttcccacctctctccatatctaattcctgattcttgttatttttaagtcataaatgtagccagtcataaatacataaatgttaaccttcgggttgcaaccttgtctcttgcagtttaaggtaatggatattgtagcccatttgaattttcttcactcttattctcgtaattctggagtttcttcagattgtggtgtattttattgtgctcctatgtaagatgaagaattaactattaaaattacattttcaacatacaaaagcttttgatgactggtaactggtatccttccaaataaatgcattgcttggtaaaaaaaaaaaaaaaaaa

SEQ ID NO: 731 - DNA, 1539 bp, Homo sapiens
gaccggacgcggcgacggtgcggggcggcgctggccctgaggtaggcggcggtaagaggggccgcccgcggcccccggctcactccggcactccgggccgctcggcctccatgcctgcccgaccgcgctgccggagccccaggtgaccagcgccatgtccagccaggtggtgggcattgagcctctctacatcaaggcagagccggccagccctgacagtccaaagggttcctcggagacagagaccgagcctcctgtggccctggcccctggtccagctcccactcgctgcctcccaggccacaaggaagaggaggatggggagggggctgggcctggcgagcagggcggtgggaagctggtgctcagctccctgcccaagcgcctctgcctggtctgtggggacgtggcctccggctaccactatggtgtggcatcctgtgaggcctgcaaagccttcttcaagaggaccatccaggggagcatcgagtacagctgtccggcctccaacgagtgtgagatcaccaagcggagacgcaaggcctgccaggcctgccgcttcaccaagtgcctgcgggtgggcatgctcaaggaggtgcaaacgaggcgtgggtcccggaagctctgttctgcgggtggccgctcgcgcctgcgcagtggaggcggcccaggcccgccttccgcagggtgtcgccgctgtgccgctagcggtgccccgcctgctgcggtggcaccagccaggaggcggagtggaagtggccgtggggcgggtatgggactagctggcgtgtgcgccctgagacgctcagcgggctatatactcgtcggtggggccggcggtcagtctgcggcagcggcagcaagacggtgcagtgaaggagagtgggcgtctggcggggtccgcagtttcagcagagccgctgcagccatggccccaatcaaggtgggagatgccatcccagcagtggaggtgtttgaaggggagccagggaacaaggtgaacctggcagagctgttcaagggcaagaagggtgtgctgtttggagttcctggggccttcacccctggatgttccaagacacacctgccagggtttgtggagcaggctgaggctctgaaggccaagggagtccaggtggtggcctgtctgagtgttaatgatgcctttgtgactggcgagtggggccgagcccacaaggcggaaggcaaggttcggctcctggctgatcccactggggcctttgggaaggagacagacttattactagatgattcgctggtgtccatctttgggaatcgacgtctcaagaggttctccatggtggtacaggatggcatagtgaaggccctgaatgtggaaccagatggcacaggcctcacctgcagcctggcacccaatatcatctcacagctctgaggccctgggccagattacttcctccacccctccctatctcacctgcccagccctgtgctggggccctgcaattggaatgttggccagatttctgcaataaacacttgtggtttgcggccatc

SEQ ID NO: 732 - DNA, 890 bp, Homo sapiens
ctgcgcagtggaggcggcccaggcccgccttccgcagggtgtcgccgctgtgccgctagcggtgccccgcctgctgcggtggcaccagccaggaggcggagtggaagtggccgtggggcgggtatgggactagctggcgtgtgcgccctgagacgctcagcgggctatatactcgtcggtggggccggcggtcagtctgcggcagcggcagcaagacggtgcagtgaaggagagtgggcgtctggcggggtccgcagtttcagcagagccgctgcagccatggccccaatcaaggtgggagatgccatcccagcagtggaggtgtttgaaggggagccagggaacaaggtgaacctggcagagctgttcaagggcaagaagggtgtgctgtttggagttcctggggccttcacccctggatgttccaagacacacctgccagggtttgtggagcaggctgaggctctgaaggccaagggagtccaggtggtggcctgtctgagtgttaatgatgcctttgtgactggcgagtggggccgagcccacaaggcggaaggcaaggttcggctcctggctgatcccactggggcctttgggaaggagacagacttattactagatgattcgctggtgtccatctttgggaatcgacgtctcaagaggttctccatggtggtacaggatggcatagtgaaggccctgaatgtggaaccagatggcacaggcctcacctgcagcctggcacccaatatcatctcacagctctgaggccctgggccagattacttcctccacccctccctatctcacctgcccagccctgtgctggggccctgcaattggaatgttggccagatttctgcaataaacacttgtggtttgcggccatc

SEQ ID NO: 733 - DNA, 959 bp, Homo sapiens
gcagtggaggcggcccaggcccgccttccgcagggtgtcgccgctgtgccgctagcggtgccccgcctgctgcggtggcaccagccaggaggcggagtggaagtggccgtggggcgggtatgggactagctggcgtgtgcgccctgagacgctcagcgggctatatactcgtcggtggggccggcggtcagtctgcggcagcggcagcaagacggtgcagtgaaggagagtgggcgtctggcggggtccgcagtttcagcagagccgctgcagccatggccccaatcaaggtgggagatgccatcccagcagtggaggtgtttgaaggggagccagggaacaaggtgaacctggcagagctgttcaagggcaagaagggtgtgctgtttggagttcctggggccttcacccctggatgttccaagacacacctgccagggtttgtggagcaggctgaggctctgaaggccaagggagtccaggtggtggcctgtctgagtgttaatgatgcctttgtgactggcgagtggggccgagcccacaaggcggaaggcaaggttcggctcctggctgatcccactggggcctttgggaaggagacagacttattactagatgattcgctggtgtccatctttgggaatcgacgtctcaagaggttctccatggtggtacaggatggcatagtgaaggccctgaatgtggaaccagatggcacaggcctcacctgcagcctggcacccaatatcatctcacagctctgaggccctgggccagattacttcctccacccctccctatctcacctgcccagccctgtgctggggccctgcaattggaatgttggccagatttctgcaataaacacttgtggtttgcggccaaaaaaaaaaaaaaaaaaaaaaaaaaaaaaaaaaaaaaaaaaaaaaaaaaaaaaaaaaaaaaaaaaaaaaaaaaaa

SEQ ID NO: 734 - DNA, 827 bp, Homo sapiens
gcagtggaggcggcccaggcccgccttccgcagggtgtcgccgctgtgccgctagcggtgccccgcctgctgcggtggcaccagccaggaggcggagtggaagtggccgtggggcgggtatgggactagctggcgtgtgcgccctgagacgctcagcgggctatatactcgtcggtggggccggcggtcagtctgcggcagcggcagcaagacggtgcagtgaaggagagtgggcgtctggcggggtccgcagtttcagcagagccgctgcagccatggccccaatcaaggtgggagatgccatcccagcagtggaggtgtttgaaggggagccagggaacaaggtgaacctggcagagctgttcaagggcaagaagggtgtgctgtttggagttcctggggccttcacccctggatgttccaaggttcggctcctggctgatcccactggggcctttgggaaggagacagacttattactagatgattcgctggtgtccatctttgggaatcgacgtctcaagaggttctccatggtggtacaggatggcatagtgaaggccctgaatgtggaaccagatggcacaggcctcacctgcagcctggcacccaatatcatctcacagctctgaggccctgggccagattacttcctccacccctccctatctcacctgcccagccctgtgctggggccctgcaattggaatgttggccagatttctgcaataaacacttgtggtttgcggccaaaaaaaaaaaaaaaaaaaaaaaaaaaaaaaaaaaaaaaaaaaaaaaaaaaaaaaaaaaaaaaaaaaaaaaaaaaa

SEQ ID NO: 735 - DNA, 943 bp, Homo sapiens
tgcaaacgaggcgtgggtcccggaagctctgttctgcgggtggccgctcgcgcctgcgcagtggaggcggcccaggcccgccttccgcagggtgtcgccgctgtgccgctagcggtgccccgcctgctgcggtggcaccagccaggaggcggagtggaagtggccgtggggcgggtatgggactagctggcgtgtgcgccctgagacgctcagcgggctatatactcgtcggtggggccggcggtcagtctgcggcagcggcagcaagacggtgcagtgaaggagagtgggcgtctggcggggtccgcagtttcagcagagccgctgcagccatggccccaatcaaggtgggagatgccatcccagcagtggaggtgtttgaaggggagccagggaacaaggtgaacctggcagagctgttcaagggcaagaagggtgtgctgtttggagttcctggggccttcacccctggatgttccaagacacacctgccagggtttgtggagcaggctgaggctctgaaggccaagggagtccaggtggtggcctgtctgagtgttaatgatgcctttgtgactggcgagtggggccgagcccacaaggcggaaggcaaggttcggctcctggctgatcccactggggcctttgggaaggagacagacttattactagatgattcgctggtgtccatctttgggaatcgacgtctcaagaggttctccatggtggtacaggatggcatagtgaaggccctgaatgtggaaccagatggcacaggcctcacctgcagcctggcacccaatatcatctcacagctctgaggccctgggccagattacttcctccacccctccctatctcacctgcccagccctgtgctggggccctgcaattggaatgttggccagatttctgcaataaacacttgtggtttgcggccatc

SEQ ID NO: 736 - DNA, 8411 bp, Homo sapiens
gcgatccgggcgccaccccgcggtcatcggtcaccggtcgctctcaggaacagcagcgcaacctctgctccctgcctcgcctcccgcgcgcctaggtgcctgcgactttaattaaagggccgtcccctcgccgaggctgcagcaccgcccccccggcttctcgcgcctcaaaatgagtagctcccactctcgggcgggccagagcgcagcaggcgcggctccgggcggcggcgtcgacacgcgggacgccgagatgccggccaccgagaaggacctggcggaggacgcgccgtggaagaagatccagcagaacactttcacgcgctggtgcaacgagcacctgaagtgcgtgagcaagcgcatcgccaacctgcagacggacctgagcgacgggctgcggcttatcgcgctgttggaggtgctcagccagaagaagatgcaccgcaagcacaaccagcggcccactttccgccaaatgcagcttgagaacgtgtcggtggcgctcgagttcctggaccgcgagagcatcaaactggtgtccatcgacagcaaggccatcgtggacgggaacctgaagctgatcctgggcctcatctggaccctgatcctgcactactccatctccatgcccatgtgggacgaggaggaggatgaggaggccaagaagcagacccccaagcagaggctcctgggctggatccagaacaagctgccgcagctgcccatcaccaacttcagccgggactggcagagcggccgggccctgggcgccctggtggacagctgtgccccgggcctgtgtcctgactgggactcttgggacgccagcaagcccgttaccaatgcgcgagaggccatgcagcaggcggatgactggctgggcatcccccaggtgatcacccccgaggagattgtggaccccaacgtggacgagcactctgtcatgacctacctgtcccagttccccaaggccaagctgaagccaggggctcccttgcggcccaaactgaacccgaagaaagcccgtgcctacgggccaggcatcgagcccacaggcaacatggtgaagaagcgggcagagttcactgtggagaccagaagtgctggccagggagaggtgctggtgtacgtggaggacccggccggacaccaggaggaggcaaaagtgaccgccaataacgacaagaaccgcaccttctccgtctggtacgtccccgaggtgacggggactcataaggttactgtgctctttgctggccagcacatcgccaagagccccttcgaggtgtacgtggataagtcacagggtgacgccagcaaagtgacagcccaaggtcccggcctggagcccagtggcaacatcgccaacaagaccacctactttgagatctttacggcaggagctggcacgggcgaggtcgaggttgtgatccaggaccccatgggacagaagggcacggtagagcctcagctggaggcccggggcgacagcacataccgctgcagctaccagcccaccatggagggcgtccacaccgtgcacgtcacgtttgccggcgtgcccatccctcgcagcccctacactgtcactgttggccaagcctgtaacccgagtgcctgccgggcggttggccggggcctccagcccaagggtgtgcgggtgaaggagacagctgacttcaaggtgtacacaaagggcgctggcagtggggagctgaaggtcaccgtgaagggccccaagggagaggagcgcgtgaagcagaaggacctgggggatggcgtgtatggcttcgagtattaccccatggtccctggaacctatatcgtcaccatcacgtggggtggtcagaacatcgggcgcagtcccttcgaagtgaaggtgggcaccgagtgtggcaatcagaaggtacgggcctggggccctgggctggagggcggcgtcgttggcaagtcagcagactttgtggtggaggctatcggggacgacgtgggcacgctgggcttctcggtggaagggccatcgcaggctaagatcgaatgtgacgacaagggcgacggctcctgtgatgtgcgctactggccgcaggaggctggcgagtatgccgttcacgtgctgtgcaacagcgaagacatccgcctcagccccttcatggctgacatccgtgacgcgccccaggacttccacccagacagggtgaaggcacgtgggcctggattggagaagacaggtgtggccgtcaacaagccagcagagttcacagtggatgccaagcacggtggcaaggccccacttcgggtccaagtccaggacaatgaaggctgccctgtggaggcgttggtcaaggacaacggcaatggcacttacagctgctcctacgtgcccaggaagccggtgaagcacacagccatggtgtcctggggaggcgtcagcatccccaacagccccttcagggtgaatgtgggagctggcagccaccccaacaaggtcaaagtatacggccccggagtagccaagacagggctcaaggcccacgagcccacctacttcactgtggactgcgccgaggctggccagggggacgtcagcatcggcatcaagtgtgcccctggagtggtaggccccgccgaagctgacatcgacttcgacatcatccgcaatgacaatgacaccttcacggtcaagtacacgccccggggggctggcagctacaccattatggtcctctttgctgaccaggccacgcccaccagccccatccgagtcaaggtggagccctctcatgacgccagtaaggtgaaggccgagggccctggcctcagtcgcactggtgtcgagcttggcaagcccacccacttcacagtaaatgccaaagctgctggcaaaggcaagctggacgtccagttctcaggactcaccaagggggatgcagtgcgagatgtggacatcatcgaccaccatgacaacacctacacagtcaagtacacgcctgtccagcagggtccagtaggcgtcaatgtcacttatggaggggatcccatccctaagagccctttctcagtggcagtatctccaagcctggacctcagcaagatcaaggtgtctggcctgggagagaaggtggacgttggcaaagaccaggagttcacagtcaaatcaaagggtgctggtggtcaaggcaaagtggcatccaagattgtgggcccctcgggtgcagcggtgccctgcaaggtggagccaggcctgggggctgacaacagtgtggtgcgcttcctgccccgtgaggaagggccctatgaggtggaggtgacctatgacggcgtgcccgtgcctggcagcccctttcctctggaagctgtggcccccaccaagcctagcaaggtgaaggcgtttgggccggggctgcagggaggcagtgcgggctcccccgcccgcttcaccatcgacaccaagggcgccggcacaggtggcctgggcctgacggtggagggcccctgtgaggcgcagctcgagtgcttggacaatggggatggcacatgttccgtgtcctacgtgcccaccgagcccggggactacaacatcaacatcctcttcgctgacacccacatccctggctccccattcaaggcccacgtggttccctgctttgacgcatccaaagtcaagtgctcaggccccgggctggagcgggccaccgctggggaggtgggccaattccaagtggactgctcgagcgcgggcagcgcggagctgaccattgagatctgctcggaggcggggcttccggccgaggtgtacatccaggaccacggtgatggcacgcacaccattacctacattcccctctgccccggggcctacaccgtcaccatcaagtacggcggccagcccgtgcccaacttccccagcaagctgcaggtggaacctgcggtggacacttccggtgtccagtgctatgggcctggtattgagggccagggtgtcttccgtgaggccaccactgagttcagtgtggacgcccgggctctgacacagaccggagggccgcacgtcaaggcccgtgtggccaacccctcaggcaacctgacggagacctacgttcaggaccgtggcgatggcatgtacaaagtggagtacacgccttacgaggagggactgcactccgtggacgtgacctatgacggcagtcccgtgcccagcagccccttccaggtgcccgtgaccgagggctgcgacccctcccgggtgcgtgtccacgggccaggcatccaaagtggcaccaccaacaagcccaacaagttcactgtggagaccaggggagctggcacgggcggcctgggcctggctgtagagggcccctccgaggccaagatgtcctgcatggataacaaggacggcagctgctcggtcgagtacatcccttatgaggctggcacctacagcctcaacgtcacctatggtggccatcaagtgccaggcagtcctttcaaggtccctgtgcatgatgtgacagatgcgtccaaggtcaagtgctctgggcccggcctgagcccaggcatggttcgtgccaacctccctcagtccttccaggtggacacaagcaaggctggtgtggccccattgcaggtcaaagtgcaagggcccaaaggcctggtggagccagtggacgtggtagacaacgctgatggcacccagaccgtcaattatgtgcccagccgagaagggccctacagcatctcagtactgtatggagatgaagaggtaccccggagccccttcaaggtcaaggtgctgcctactcatgatgccagcaaggtgaaggccagtggccccgggctcaacaccactggcgtgcctgccagcctgcccgtggagttcaccatcgatgcaaaggacgccggggagggcctgctggctgtccagatcacggatcccgaaggcaagccgaagaagacacacatccaagacaaccatgacggcacgtatacagtggcctacgtgccagacgtgacaggtcgctacaccatcctcatcaagtacggtggtgacgagatccccttctccccgtaccgcgtgcgtgccgtgcccaccggggacgccagcaagtgcactgtcacaggtgctggcatcggccccaccattcagattggggaggagacggtgatcactgtggacactaaggcggcaggcaaaggcaaagtgacgtgcaccgtgtgcacgcctgatggctcagaggtggatgtggacgtggtggagaatgaggacggcactttcgacatcttctacacggccccccagccgggcaaatacgtcatctgtgtgcgctttggtggcgagcacgtgcccaacagccccttccaagtgacggctctggctggggaccagccctcggtgcagccccctctacggtctcagcagctggccccacagtacacctacgcccagggcggccagcagacttgggccccggagaggcccctggtgggtgtcaatgggctggatgtgaccagcctgaggccctttgaccttgtcatccccttcaccatcaagaagggcgagatcacaggggaggttcggatgccctcaggcaaggtggcgcagcccaccatcactgacaacaaagacggcaccgtgaccgtgcggtatgcacccagcgaggctggcctgcacgagatggacatccgctatgacaacatgcacatcccaggaagccccttgcagttctatgtggattacgtcaactgtggccatgtcactgcctatgggcctggcctcacccatggagtagtgaacaagcctgccaccttcaccgtcaacaccaaggatgcaggagaggggggcctgtctctggccattgagggcccgtccaaagcagaaatcagctgcactgacaaccaggatgggacatgcagcgtgtcctacctgcctgtgctgccgggggactacagcattctagtcaagtacaatgaacagcacgtcccaggcagccccttcactgctcgggtcacaggtgacgactccatgcgtatgtcccacctaaaggtcggctctgctgccgacatccccatcaacatctcagagacggatctcagcctgctgacggccactgtggtcccgccctcgggccgggaggagccctgtttgctgaagcggctgcgtaatggccacgtggggatttcattcgtgcccaaggagacgggggagcacctggtgcatgtgaagaaaaatggccagcacgtggccagcagccccatcccggtggtgatcagccagtcggaaattggggatgccagtcgtgttcgggtctctggtcagggccttcacgaaggccacacctttgagcctgcagagtttatcattgatacccgcgatgcaggctatggtgggctcagcctgtccattgagggccccagcaaggtggacatcaacacagaggacctggaggacgggacgtgcagggtcacctactgccccacagagccaggcaactacatcatcaacatcaagtttgccgaccagcacgtgcctggcagccccttctctgtgaaggtgacaggcgagggccgggtgaaagagagcatcacccgcaggcgtcgggctccttcagtggccaacgttggtagtcattgtgacctcagcctgaaaatccctgaaattagcatccaggatatgacagcccaggtgaccagcccatcgggcaagacccatgaggccgagatcgtggaaggggagaaccacacctactgcatccgctttgttcccgctgagatgggcacacacacagtcagcgtgaagtacaagggccagcacgtgcctgggagccccttccagttcaccgtggggcccctaggggaagggggagcccacaaggtccgagctgggggccctggcctggagagagctgaagctggagtgccagccgaattcagtatctggacccgggaagctggtgctggaggcctggccattgctgtcgagggccccagcaaggctgagatctcttttgaggaccgcaaggacggctcctgtggtgtggcttatgtggtccaggagccaggtgactacgaagtctcagtcaagttcaacgaggaacacattcccgacagccccttcgtggtgcctgtggcttctccgtctggcgacgcccgccgcctcactgtttctagccttcaggagtcagggctaaaggtcaaccagccagcctcttttgcagtcagcctgaacggggccaagggggcgatcgatgccaaggtgcacagcccctcaggagccctggaggagtgctatgtcacagaaattgaccaagataagtatgctgtgcgcttcatccctcgggagaatggcgtttacctgattgacgtcaagttcaacggcacccacatccctggaagccccttcaagatccgagttggggagcctgggcatggaggggacccaggcttggtgtctgcttacggagcaggtctggaaggcggtgtcacagggaacccagctgagttcgtcgtgaacacgagcaatgcgggagctggtgccctgtcggtgaccattgacggcccctccaaggtgaagatggattgccaggagtgccctgagggctaccgcgtcacctatacccccatggcacctggcagctacctcatctccatcaagtacggcggcccctaccacattgggggcagccccttcaaggccaaagtcacaggcccccgtctcgtcagcaaccacagcctccacgagacatcatcagtgtttgtagactctctgaccaaggccacctgtgccccccagcatggggccccgggtcctgggcctgctgacgccagcaaggtggtggccaagggcctggggctgagcaaggcctacgtaggccagaagagcagcttcacagtagactgcagcaaagcaggcaacaacatgctgctggtgggggttcatggcccaaggaccccctgcgaggagatcctggtgaagcacgtgggcagccggctctacagcgtgtcctacctgctcaaggacaagggggagtacacactggtggtcaaatggggggacgagcacatcccaggcagcccctaccgcgttgtggtgccctgagtctggggcccgtgccagccggcagcccccaagcctgccccgctacccaagcagccccgccctcttcccctcaaccccggcccaggccgccctggccgcccgcctgtcactgcagccgcccctgccctgtgccgtgctgcgctcacctgcctccccagccagccgctgacctctcggctttcacttgggcagagggagccatttggtggcgctgcttgtcttctttggttctgggaggggtgagggatgggggtcctgtacacaaccacccactagttctcttctccagccaagaggaataaagttttgcttccattct

SEQ ID NO: 737 - DNA, 8435 bp, Homo sapiens
gcgatccgggcgccaccccgcggtcatcggtcaccggtcgctctcaggaacagcagcgcaacctctgctccctgcctcgcctcccgcgcgcctaggtgcctgcgactttaattaaagggccgtcccctcgccgaggctgcagcaccgcccccccggcttctcgcgcctcaaaatgagtagctcccactctcgggcgggccagagcgcagcaggcgcggctccgggcggcggcgtcgacacgcgggacgccgagatgccggccaccgagaaggacctggcggaggacgcgccgtggaagaagatccagcagaacactttcacgcgctggtgcaacgagcacctgaagtgcgtgagcaagcgcatcgccaacctgcagacggacctgagcgacgggctgcggcttatcgcgctgttggaggtgctcagccagaagaagatgcaccgcaagcacaaccagcggcccactttccgccaaatgcagcttgagaacgtgtcggtggcgctcgagttcctggaccgcgagagcatcaaactggtgtccatcgacagcaaggccatcgtggacgggaacctgaagctgatcctgggcctcatctggaccctgatcctgcactactccatctccatgcccatgtgggacgaggaggaggatgaggaggccaagaagcagacccccaagcagaggctcctgggctggatccagaacaagctgccgcagctgcccatcaccaacttcagccgggactggcagagcggccgggccctgggcgccctggtggacagctgtgccccgggcctgtgtcctgactgggactcttgggacgccagcaagcccgttaccaatgcgcgagaggccatgcagcaggcggatgactggctgggcatcccccaggtgatcacccccgaggagattgtggaccccaacgtggacgagcactctgtcatgacctacctgtcccagttccccaaggccaagctgaagccaggggctcccttgcggcccaaactgaacccgaagaaagcccgtgcctacgggccaggcatcgagcccacaggcaacatggtgaagaagcgggcagagttcactgtggagaccagaagtgctggccagggagaggtgctggtgtacgtggaggacccggccggacaccaggaggaggcaaaagtgaccgccaataacgacaagaaccgcaccttctccgtctggtacgtccccgaggtgacggggactcataaggttactgtgctctttgctggccagcacatcgccaagagccccttcgaggtgtacgtggataagtcacagggtgacgccagcaaagtgacagcccaaggtcccggcctggagcccagtggcaacatcgccaacaagaccacctactttgagatctttacggcaggagctggcacgggcgaggtcgaggttgtgatccaggaccccatgggacagaagggcacggtagagcctcagctggaggcccggggcgacagcacataccgctgcagctaccagcccaccatggagggcgtccacaccgtgcacgtcacgtttgccggcgtgcccatccctcgcagcccctacactgtcactgttggccaagcctgtaacccgagtgcctgccgggcggttggccggggcctccagcccaagggtgtgcgggtgaaggagacagctgacttcaaggtgtacacaaagggcgctggcagtggggagctgaaggtcaccgtgaagggccccaagggagaggagcgcgtgaagcagaaggacctgggggatggcgtgtatggcttcgagtattaccccatggtccctggaacctatatcgtcaccatcacgtggggtggtcagaacatcgggcgcagtcccttcgaagtgaaggtgggcaccgagtgtggcaatcagaaggtacgggcctggggccctgggctggagggcggcgtcgttggcaagtcagcagactttgtggtggaggctatcggggacgacgtgggcacgctgggcttctcggtggaagggccatcgcaggctaagatcgaatgtgacgacaagggcgacggctcctgtgatgtgcgctactggccgcaggaggctggcgagtatgccgttcacgtgctgtgcaacagcgaagacatccgcctcagccccttcatggctgacatccgtgacgcgccccaggacttccacccagacagggtgaaggcacgtgggcctggattggagaagacaggtgtggccgtcaacaagccagcagagttcacagtggatgccaagcacggtggcaaggccccacttcgggtccaagtccaggacaatgaaggctgccctgtggaggcgttggtcaaggacaacggcaatggcacttacagctgctcctacgtgcccaggaagccggtgaagcacacagccatggtgtcctggggaggcgtcagcatccccaacagccccttcagggtgaatgtgggagctggcagccaccccaacaaggtcaaagtatacggccccggagtagccaagacagggctcaaggcccacgagcccacctacttcactgtggactgcgccgaggctggccagggggacgtcagcatcggcatcaagtgtgcccctggagtggtaggccccgccgaagctgacatcgacttcgacatcatccgcaatgacaatgacaccttcacggtcaagtacacgccccggggggctggcagctacaccattatggtcctctttgctgaccaggccacgcccaccagccccatccgagtcaaggtggagccctctcatgacgccagtaaggtgaaggccgagggccctggcctcagtcgcactggtgtcgagcttggcaagcccacccacttcacagtaaatgccaaagctgctggcaaaggcaagctggacgtccagttctcaggactcaccaagggggatgcagtgcgagatgtggacatcatcgaccaccatgacaacacctacacagtcaagtacacgcctgtccagcagggtccagtaggcgtcaatgtcacttatggaggggatcccatccctaagagccctttctcagtggcagtatctccaagcctggacctcagcaagatcaaggtgtctggcctgggagagaaggtggacgttggcaaagaccaggagttcacagtcaaatcaaagggtgctggtggtcaaggcaaagtggcatccaagattgtgggcccctcgggtgcagcggtgccctgcaaggtggagccaggcctgggggctgacaacagtgtggtgcgcttcctgccccgtgaggaagggccctatgaggtggaggtgacctatgacggcgtgcccgtgcctggcagcccctttcctctggaagctgtggcccccaccaagcctagcaaggtgaaggcgtttgggccggggctgcagggaggcagtgcgggctcccccgcccgcttcaccatcgacaccaagggcgccggcacaggtggcctgggcctgacggtggagggcccctgtgaggcgcagctcgagtgcttggacaatggggatggcacatgttccgtgtcctacgtgcccaccgagcccggggactacaacatcaacatcctcttcgctgacacccacatccctggctccccattcaaggcccacgtggttccctgctttgacgcatccaaagtcaagtgctcaggccccgggctggagcgggccaccgctggggaggtgggccaattccaagtggactgctcgagcgcgggcagcgcggagctgaccattgagatctgctcggaggcggggcttccggccgaggtgtacatccaggaccacggtgatggcacgcacaccattacctacattcccctctgccccggggcctacaccgtcaccatcaagtacggcggccagcccgtgcccaacttccccagcaagctgcaggtggaacctgcggtggacacttccggtgtccagtgctatgggcctggtattgagggccagggtgtcttccgtgaggccaccactgagttcagtgtggacgcccgggctctgacacagaccggagggccgcacgtcaaggcccgtgtggccaacccctcaggcaacctgacggagacctacgttcaggaccgtggcgatggcatgtacaaagtggagtacacgccttacgaggagggactgcactccgtggacgtgacctatgacggcagtcccgtgcccagcagccccttccaggtgcccgtgaccgagggctgcgacccctcccgggtgcgtgtccacgggccaggcatccaaagtggcaccaccaacaagcccaacaagttcactgtggagaccaggggagctggcacgggcggcctgggcctggctgtagagggcccctccgaggccaagatgtcctgcatggataacaaggacggcagctgctcggtcgagtacatcccttatgaggctggcacctacagcctcaacgtcacctatggtggccatcaagtgccaggcagtcctttcaaggtccctgtgcatgatgtgacagatgcgtccaaggtcaagtgctctgggcccggcctgagcccaggcatggttcgtgccaacctccctcagtccttccaggtggacacaagcaaggctggtgtggccccattgcaggtcaaagtgcaagggcccaaaggcctggtggagccagtggacgtggtagacaacgctgatggcacccagaccgtcaattatgtgcccagccgagaagggccctacagcatctcagtactgtatggagatgaagaggtaccccggagccccttcaaggtcaaggtgctgcctactcatgatgccagcaaggtgaaggccagtggccccgggctcaacaccactggcgtgcctgccagcctgcccgtggagttcaccatcgatgcaaaggacgccggggagggcctgctggctgtccagatcacggatcccgaaggcaagccgaagaagacacacatccaagacaaccatgacggcacgtatacagtggcctacgtgccagacgtgacaggtcgctacaccatcctcatcaagtacggtggtgacgagatccccttctccccgtaccgcgtgcgtgccgtgcccaccggggacgccagcaagtgcactgtcacagtgtcaatcggaggtcacgggctaggtgctggcatcggccccaccattcagattggggaggagacggtgatcactgtggacactaaggcggcaggcaaaggcaaagtgacgtgcaccgtgtgcacgcctgatggctcagaggtggatgtggacgtggtggagaatgaggacggcactttcgacatcttctacacggccccccagccgggcaaatacgtcatctgtgtgcgctttggtggcgagcacgtgcccaacagccccttccaagtgacggctctggctggggaccagccctcggtgcagccccctctacggtctcagcagctggccccacagtacacctacgcccagggcggccagcagacttgggccccggagaggcccctggtgggtgtcaatgggctggatgtgaccagcctgaggccctttgaccttgtcatccccttcaccatcaagaagggcgagatcacaggggaggttcggatgccctcaggcaaggtggcgcagcccaccatcactgacaacaaagacggcaccgtgaccgtgcggtatgcacccagcgaggctggcctgcacgagatggacatccgctatgacaacatgcacatcccaggaagccccttgcagttctatgtggattacgtcaactgtggccatgtcactgcctatgggcctggcctcacccatggagtagtgaacaagcctgccaccttcaccgtcaacaccaaggatgcaggagaggggggcctgtctctggccattgagggcccgtccaaagcagaaatcagctgcactgacaaccaggatgggacatgcagcgtgtcctacctgcctgtgctgccgggggactacagcattctagtcaagtacaatgaacagcacgtcccaggcagccccttcactgctcgggtcacaggtgacgactccatgcgtatgtcccacctaaaggtcggctctgctgccgacatccccatcaacatctcagagacggatctcagcctgctgacggccactgtggtcccgccctcgggccgggaggagccctgtttgctgaagcggctgcgtaatggccacgtggggatttcattcgtgcccaaggagacgggggagcacctggtgcatgtgaagaaaaatggccagcacgtggccagcagccccatcccggtggtgatcagccagtcggaaattggggatgccagtcgtgttcgggtctctggtcagggccttcacgaaggccacacctttgagcctgcagagtttatcattgatacccgcgatgcaggctatggtgggctcagcctgtccattgagggccccagcaaggtggacatcaacacagaggacctggaggacgggacgtgcagggtcacctactgccccacagagccaggcaactacatcatcaacatcaagtttgccgaccagcacgtgcctggcagccccttctctgtgaaggtgacaggcgagggccgggtgaaagagagcatcacccgcaggcgtcgggctccttcagtggccaacgttggtagtcattgtgacctcagcctgaaaatccctgaaattagcatccaggatatgacagcccaggtgaccagcccatcgggcaagacccatgaggccgagatcgtggaaggggagaaccacacctactgcatccgctttgttcccgctgagatgggcacacacacagtcagcgtgaagtacaagggccagcacgtgcctgggagccccttccagttcaccgtggggcccctaggggaagggggagcccacaaggtccgagctgggggccctggcctggagagagctgaagctggagtgccagccgaattcagtatctggacccgggaagctggtgctggaggcctggccattgctgtcgagggccccagcaaggctgagatctcttttgaggaccgcaaggacggctcctgtggtgtggcttatgtggtccaggagccaggtgactacgaagtctcagtcaagttcaacgaggaacacattcccgacagccccttcgtggtgcctgtggcttctccgtctggcgacgcccgccgcctcactgtttctagccttcaggagtcagggctaaaggtcaaccagccagcctcttttgcagtcagcctgaacggggccaagggggcgatcgatgccaaggtgcacagcccctcaggagccctggaggagtgctatgtcacagaaattgaccaagataagtatgctgtgcgcttcatccctcgggagaatggcgtttacctgattgacgtcaagttcaacggcacccacatccctggaagccccttcaagatccgagttggggagcctgggcatggaggggacccaggcttggtgtctgcttacggagcaggtctggaaggcggtgtcacagggaacccagctgagttcgtcgtgaacacgagcaatgcgggagctggtgccctgtcggtgaccattgacggcccctccaaggtgaagatggattgccaggagtgccctgagggctaccgcgtcacctatacccccatggcacctggcagctacctcatctccatcaagtacggcggcccctaccacattgggggcagccccttcaaggccaaagtcacaggcccccgtctcgtcagcaaccacagcctccacgagacatcatcagtgtttgtagactctctgaccaaggccacctgtgccccccagcatggggccccgggtcctgggcctgctgacgccagcaaggtggtggccaagggcctggggctgagcaaggcctacgtaggccagaagagcagcttcacagtagactgcagcaaagcaggcaacaacatgctgctggtgggggttcatggcccaaggaccccctgcgaggagatcctggtgaagcacgtgggcagccggctctacagcgtgtcctacctgctcaaggacaagggggagtacacactggtggtcaaatggggggacgagcacatcccaggcagcccctaccgcgttgtggtgccctgagtctggggcccgtgccagccggcagcccccaagcctgccccgctacccaagcagccccgccctcttcccctcaaccccggcccaggccgccctggccgcccgcctgtcactgcagccgcccctgccctgtgccgtgctgcgctcacctgcctccccagccagccgctgacctctcggctttcacttgggcagagggagccatttggtggcgctgcttgtcttctttggttctgggaggggtgagggatgggggtcctgtacacaaccacccactagttctcttctccagccaagaggaataaagttttgcttccattct

SEQ ID NO: 738 - DNA, 8206 bp, Homo sapiens
gcgatccgggcgccaccccgcggtcatcggtcaccggtcgctctcaggaacagcagcgcaacctctgctccctgcctcgcctcccgcgcgcctaggtgcctgcgactttaattaaagggccgtcccctcgccgaggctgcagcaccgcccccccggcttctcgcgcctcaaaatgagtagctcccactctcgggcgggccagagcgcagcaggcgcggctccgggcggcggcgtcgacacgcgggacgccgagatgccggccaccgagaaggacctggcggaggacgcgccgtggaagaagatccagcagaacactttcacgcgctggtgcaacgagcacctgaagtgcgtgagcaagcgcatcgccaacctgcagacggacctgagcgacgggctgcggcttatcgcgctgttggaggtgctcagccagaagaagatgcaccgcaagcacaaccagcggcccactttccgccaaatgcagcttgagaacgtgtcggtggcgctcgagttcctggaccgcgagagcatcaaactggtgtccatcgacagcaaggccatcgtggacgggaacctgaagctgatcctgggcctcatctggaccctgatcctgcactactccatctccatgcccatgtgggacgaggaggaggatgaggaggccaagaagcagacccccaagcagaggctcctgggctggatccagaacaagctgccgcagctgcccatcaccaacttcagccgggactggcagagcggccgggccctgggcgccctggtggacagctgtgccccgggcctgtgtcctgactgggactcttgggacgccagcaagcccgttaccaatgcgcgagaggccatgcagcaggcggatgactggctgggcatcccccaggtgatcacccccgaggagattgtggaccccaacgtggacgagcactctgtcatgacctacctgtcccagttccccaaggccaagctgaagccaggggctcccttgcggcccaaactgaacccgaagaaagcccgtgcctacgggccaggcatcgagcccacaggcaacatggtgaagaagcgggcagagttcactgtggagaccagaagtgctggccagggagaggtgctggtgtacgtggaggacccggccggacaccaggaggaggcaaaagtgaccgccaataacgacaagaaccgcaccttctccgtctggtacgtccccgaggtgacggggactcataaggttactgtgctctttgctggccagcacatcgccaagagccccttcgaggtgtacgtggataagtcacagggtgacgccagcaaagtgacagcccaaggtcccggcctggagcccagtggcaacatcgccaacaagaccacctactttgagatctttacggcaggagctggcacgggcgaggtcgaggttgtgatccaggaccccatgggacagaagggcacggtagagcctcagctggaggcccggggcgacagcacataccgctgcagctaccagcccaccatggagggcgtccacaccgtgcacgtcacgtttgccggcgtgcccatccctcgcagcccctacactgtcactgttggccaagcctgtaacccgagtgcctgccgggcggttggccggggcctccagcccaagggtgtgcgggtgaaggagacagctgacttcaaggtgtacacaaagggcgctggcagtggggagctgaaggtcaccgtgaagggccccaagggagaggagcgcgtgaagcagaaggacctgggggatggcgtgtatggcttcgagtattaccccatggtccctggaacctatatcgtcaccatcacgtggggtggtcagaacatcgggcgcagtcccttcgaagtgaaggtgggcaccgagtgtggcaatcagaaggtacgggcctggggccctgggctggagggcggcgtcgttggcaagtcagcagactttgtggtggaggctatcggggacgacgtgggcacgctgggcttctcggtggaagggccatcgcaggctaagatcgaatgtgacgacaagggcgacggctcctgtgatgtgcgctactggccgcaggaggctggcgagtatgccgttcacgtgctgtgcaacagcgaagacatccgcctcagccccttcatggctgacatccgtgacgcgccccaggacttccacccagacagggtgaaggcacgtgggcctggattggagaagacaggtgtggccgtcaacaagccagcagagttcacagtggatgccaagcacggtggcaaggccccacttcgggtccaagtccaggacaatgaaggctgccctgtggaggcgttggtcaaggacaacggcaatggcacttacagctgctcctacgtgcccaggaagccggtgaagcacacagccatggtgtcctggggaggcgtcagcatccccaacagccccttcagggtgaatgtgggagctggcagccaccccaacaaggtcaaagtatacggccccggagtagccaagacagggctcaaggcccacgagcccacctacttcactgtggactgcgccgaggctggccagggggacgtcagcatcggcatcaagtgtgcccctggagtggtaggccccgccgaagctgacatcgacttcgacatcatccgcaatgacaatgacaccttcacggtcaagtacacgccccggggggctggcagctacaccattatggtcctctttgctgaccaggccacgcccaccagccccatccgagtcaaggtggagccctctcatgacgccagtaaggtgaaggccgagggccctggcctcagtcgcactggtgtcgagcttggcaagcccacccacttcacagtaaatgccaaagctgctggcaaaggcaagctggacgtccagttctcaggactcaccaagggggatgcagtgcgagatgtggacatcatcgaccaccatgacaacacctacacagtcaagtacacgcctgtccagcagggtccagtaggcgtcaatgtcacttatggaggggatcccatccctaagagccctttctcagtggcagtatctccaagcctggacctcagcaagatcaaggtgtctggcctgggagagaaggtggacgttggcaaagaccaggagttcacagtcaaatcaaagggtgctggtggtcaaggcaaagtggcatccaagattgtgggcccctcgggtgcagcggtgccctgcaaggtggagccaggcctgggggctgacaacagtgtggtgcgcttcctgccccgtgaggaagggccctatgaggtggaggtgacctatgacggcgtgcccgtgcctggcagcccctttcctctggaagctgtggcccccaccaagcctagcaaggtgaaggcgtttgggccggggctgcagggaggcagtgcgggctcccccgcccgcttcaccatcgacaccaagggcgccggcacaggtggcctgggcctgacggtggagggcccctgtgaggcgcagctcgagtgcttggacaatggggatggcacatgttccgtgtcctacgtgcccaccgagcccggggactacaacatcaacatcctcttcgctgacacccacatccctggctccccattcaaggcccacgtggttccctgctttgacgcatccaaagtcaagtgctcaggccccgggctggagcgggccaccgctggggaggtgggccaattccaagtggactgctcgagcgcgggcagcgcggagctgaccattgagatctgctcggaggcggggcttccggccgaggtgtacatccaggaccacggtgatggcacgcacaccattacctacattcccctctgccccggggcctacaccgtcaccatcaagtacggcggccagcccgtgcccaacttccccagcaagctgcaggtggaacctgcggtggacacttccggtgtccagtgctatgggcctggtattgagggccagggtgtcttccgtgaggccaccactgagttcagtgtggacgcccgggctctgacacagaccggagggccgcacgtcaaggcccgtgtggccaacccctcaggcaacctgacggagacctacgttcaggaccgtggcgatggcatgtacaaagtggagtacacgccttacgaggagggactgcactccgtggacgtgacctatgacggcagtcccgtgcccagcagccccttccaggtgcccgtgaccgagggctgcgacccctcccgggtgcgtgtccacgggccaggcatccaaagtggcaccaccaacaagcccaacaagttcactgtggagaccaggggagctggcacgggcggcctgggcctggctgtagagggcccctccgaggccaagatgtcctgcatggataacaaggacggcagctgctcggtcgagtacatcccttatgaggctggcacctacagcctcaacgtcacctatggtggccatcaagtgccaggcagtcctttcaaggtccctgtgcatgatgtgacagatgcgtccaaggtcaagtgctctgggcccggcctgagcccaggcatggttcgtgccaacctccctcagtccttccaggtggacacaagcaaggctggtgtggccccattgcaggtcaaagtgcaagggcccaaaggcctggtggagccagtggacgtggtagacaacgctgatggcacccagaccgtcaattatgtgcccagccgagaagggccctacagcatctcagtactgtatggagatgaagaggtaccccggagccccttcaaggtcaaggtgctgcctactcatgatgccagcaaggtgaaggccagtggccccgggctcaacaccactggcgtgcctgccagcctgcccgtggagttcaccatcgatgcaaaggacgccggggagggcctgctggctgtccagatcacggatcccgaaggcaagccgaagaagacacacatccaagacaaccatgacggcacgtatacagtggcctacgtgccagacgtgacaggtcgctacaccatcctcatcaagtacggtggtgacgagatccccttctccccgtaccgcgtgcgtgccgtgcccaccggggacgccagcaagtgcactgtcacagtgtcaatcggaggtcacgggctaggtgctggcatcggccccaccattcagattggggaggagacggtgatcactgtggacactaaggcggcaggcaaaggcaaagtgacgtgcaccgtgtgcacgcctgatggctcagaggtggatgtggacgtggtggagaatgaggacggcactttcgacatcttctacacggccccccagccgggcaaatacgtcatctgtgtgcgctttggtggcgagcacgtgcccaacagccccttccaagtgacggctctggctggggaccagccctcggtgcagccccctctacggtctcagcagctggccccacagtacacctacgcccagggcggccagcagacttgggccccggagaggcccctggtgggtgtcaatgggctggatgtgaccagcctgaggccctttgaccttgtcatccccttcaccatcaagaagggcgagatcacaggggaggttcggatgccctcaggcaaggtggcgcagcccaccatcactgacaacaaagacggcaccgtgaccgtgcggtatgcacccagcgaggctggcctgcacgagatggacatccgctatgacaacatgcacatcccaggaagccccttgcagttctatgtggattacgtcaactgtggccatgtcactgcctatgggcctggcctcacccatggagtagtgaacaagcctgccaccttcaccgtcaacaccaaggatgcaggagaggggggcctgtctctggccattgagggcccgtccaaagcagaaatcagctgcactgacaaccaggatgggacatgcagcgtgtcctacctgcctgtgctgccgggggactacagcattctagtcaagtacaatgaacagcacgtcccaggcagccccttcactgctcgggtcacaggtgacgactccatgcgtatgtcccacctaaaggtcggctctgctgccgacatccccatcaacatctcagagacggatctcagcctgctgacggccactgtggtcccgccctcgggccgggaggagccctgtttgctgaagcggctgcgtaatggccacgtggggatttcattcgtgcccaaggagacgggggagcacctggtgcatgtgaagaaaaatggccagcacgtggccagcagccccatcccggtggtgatcagccagtcggaaattggggatgccagtcgtgttcgggtctctggtcagggccttcacgaaggccacacctttgagcctgcagagtttatcattgatacccgcgatgcaggctatggtgggctcagcctgtccattgagggccccagcaaggtggacatcaacacagaggacctggaggacgggacgtgcagggtcacctactgccccacagagccaggcaactacatcatcaacatcaagtttgccgaccagcacgtgcctggcagccccttctctgtgaaggtgacaggcgagggccgggtgaaagagagcatcacccgcaggcgtcgggctccttcagtggccaacgttggtagtcattgtgacctcagcctgaaaatccctgaaattagcatccaggatatgacagcccaggtgaccagcccatcgggcaagacccatgaggccgagatcgtggaaggggagaaccacacctactgcatccgctttgttcccgctgagatgggcacacacacagtcagcgtgaagtacaagggccagcacgtgcctgggagccccttccagttcaccgtggggcccctaggggaagggggagcccacaaggtccgagctgggggccctggcctggagagagctgaagctggagtgccagccgaattcagtatctggacccgggaagctggtgctggaggcctggccattgctgtcgagggccccagcaaggctgagatctcttttgaggaccgcaaggacggctcctgtggtgtggcttatgtggtccaggagccaggtatacgaagtctcagtcaagttcaacgaggaacacattcccgacagccccttcgtggtgcctgtggcttctccgtctggcgacgcccgccgcctcactgtttctagccttcaggagtcagggctaaaggtcaaccagccagcctcttttgcagtcagcctgaacggggccaagggggcgatcgatgccaaggtgcacagcccctcaggagccctggaggagtgctatgtcacagaaattgaccaagataagtatgctgtgcgcttcatccctcgggagaatggcgtttacctgattgacgtcaagttcaacggcacccacatccctggaagccccttcaagatccgagttggggagcctgggcatggaggggacccaggcttggtgtctgcttacggagcaggtctggaaggcggtgtcacagggaacccagctgagttcgtcgtgaacacgagcaatgcgggagctggtgccctgtcggtgaccattgacggcccctccaaggtgaagatggattgccaggagtgccctgagggctaccgcgtcacctatacccccatggcacctggcagctacctcatctccatcaagtacggcggcccctaccacattgggggcagccccttcaaggccaaagtcacaggcccccgtctcgtcagcaaccacagcctccacgagacatcatcagtgtttgtagactctctgaccaaggccacctgtgccccccagcatggggccccgggtcctgggcctgctgacgccagcaaggtggtggccaagggcctggggctgagcaaggcctacgtaggccagaagagcagcttcacagtagactgcagcaaagcaggcaacaacatgctgctggtgggggttcatggcccaaggaccccctgcgaggagatcctggtgaagcacgtgggcagccggctctacagcgtgtcctacctgcgctcacctgcctccccagccagccgctgacctctcggctttcacttgggcagagggagccatttggtggcgctgcttgtcttctttggttctgggaggggtgagggatgggggtcctgtacacaaccacccactagttctcttctccagccaagaggaataaagttttgcttccattc

SEQ ID NO: 739 - DNA, 8850 bp, Homo sapiens
gcgatccgggcgccaccccgcggtcatcggtcaccggtcgctctcaggaacagcagcgcaacctctgctccctgcctcgcctcccgcgcgcctaggtgcctgcgactttaattaaagggccgtcccctcgccgaggctgcagcaccgcccccccggcttctcgcgcctcaaaatgagtagctcccactctcgggcgggccagagcgcagcaggcgcggctccgggcggcggcgtcgacacgcgggacgccgagatgccggccaccgagaaggacctggcggaggacgcgccgtggaagaagatccagcagaacactttcacgcgctggtgcaacgagcacctgaagtgcgtgagcaagcgcatcgccaacctgcagacggacctgagcgacgggctgcggcttatcgcgctgttggaggtgctcagccagaagaagatgcaccgcaagcacaaccagcggcccactttccgccaaatgcagcttgagaacgtgtcggtggcgctcgagttcctggaccgcgagagcatcaaactggtgtccatcgacagcaaggccatcgtggacgggaacctgaagctgatcctgggcctcatctggaccctgatcctgcactactccatctccatgcccatgtgggacgaggaggaggatgaggaggccaagaagcagacccccaagcagaggctcctgggctggatccagaacaagctgccgcagctgcccatcaccaacttcagccgggactggcagagcggccgggccctgggcgccctggtggacagctgtgccccgggcctgtgtcctgactgggactcttgggacgccagcaagcccgttaccaatgcgcgagaggccatgcagcaggcggatgactggctgggcatcccccaggtgatcacccccgaggagattgtggaccccaacgtggacgagcactctgtcatgacctacctgtcccagttccccaaggccaagctgaagccaggggctcccttgcggcccaaactgaacccgaagaaagcccgtgcctacgggccaggcatcgagcccacaggcaacatggtgaagaagcgggcagagttcactgtggagaccagaagtgctggccagggagaggtgctggtgtacgtggaggacccggccggacaccaggaggaggcaaaagtgaccgccaataacgacaagaaccgcaccttctccgtctggtacgtccccgaggtgacggggactcataaggttactgtgctctttgctggccagcacatcgccaagagccccttcgaggtgtacgtggataagtcacagggtgacgccagcaaagtgacagcccaaggtcccggcctggagcccagtggcaacatcgccaacaagaccacctactttgagatctttacggcaggagctggcacgggcgaggtcgaggttgtgatccaggaccccatgggacagaagggcacggtagagcctcagctggaggcccggggcgacagcacataccgctgcagctaccagcccaccatggagggcgtccacaccgtgcacgtcacgtttgccggcgtgcccatccctcgcagcccctacactgtcactgttggccaagcctgtaacccgagtgcctgccgggcggttggccggggcctccagcccaagggtgtgcgggtgaaggagacagctgacttcaaggtgtacacaaagggcgctggcagtggggagctgaaggtcaccgtgaagggccccaagggagaggagcgcgtgaagcagaaggacctgggggatggcgtgtatggcttcgagtattaccccatggtccctggaacctatatcgtcaccatcacgtggggtggtcagaacatcgggcgcagtcccttcgaagtgaaggtgggcaccgagtgtggcaatcagaaggtacgggcctggggccctgggctggagggcggcgtcgttggcaagtcagcagactttgtggtggaggctatcggggacgacgtgggcacgctgggcttctcggtggaagggccatcgcaggctaagatcgaatgtgacgacaagggcgacggctcctgtgatgtgcgctactggccgcaggaggctggcgagtatgccgttcacgtgctgtgcaacagcgaagacatccgcctcagccccttcatggctgacatccgtgacgcgccccaggacttccacccagacagggtgaaggcacgtgggcctggattggagaagacaggtgtggccgtcaacaagccagcagagttcacagtggatgccaagcacggtggcaaggccccacttcgggtccaagtccaggacaatgaaggctgccctgtggaggcgttggtcaaggacaacggcaatggcacttacagctgctcctacgtgcccaggaagccggtgaagcacacagccatggtgtcctggggaggcgtcagcatccccaacagccccttcagggtgaatgtgggagctggcagccaccccaacaaggtcaaagtatacggccccggagtagccaagacagggctcaaggcccacgagcccacctacttcactgtggactgcgccgaggctggccagggggacgtcagcatcggcatcaagtgtgcccctggagtggtaggccccgccgaagctgacatcgacttcgacatcatccgcaatgacaatgacaccttcacggtcaagtacacgccccggggggctggcagctacaccattatggtcctctttgctgaccaggccacgcccaccagccccatccgagtcaaggtggagccctctcatgacgccagtaaggtgaaggccgagggccctggcctcagtcgcactggtgtcgagcttggcaagcccacccacttcacagtaaatgccaaagctgctggcaaaggcaagctggacgtccagttctcaggactcaccaagggggatgcagtgcgagatgtggacatcatcgaccaccatgacaacacctacacagtcaagtacacgcctgtccagcagggtccagtaggcgtcaatgtcacttatggaggggatcccatccctaagagccctttctcagtggcagtatctccaagcctggacctcagcaagatcaaggtgtctggcctgggagagaaggtggacgttggcaaagaccaggagttcacagtcaaatcaaagggtgctggtggtcaaggcaaagtggcatccaagattgtgggcccctcgggtgcagcggtgccctgcaaggtggagccaggcctgggggctgacaacagtgtggtgcgcttcctgccccgtgaggaagggccctatgaggtggaggtgacctatgacggcgtgcccgtgcctggcagcccctttcctctggaagctgtggcccccaccaagcctagcaaggtgaaggcgtttgggccggggctgcagggaggcagtgcgggctcccccgcccgcttcaccatcgacaccaagggcgccggcacaggtggcctgggcctgacggtggagggcccctgtgaggcgcagctcgagtgcttggacaatggggatggcacatgttccgtgtcctacgtgcccaccgagcccggggactacaacatcaacatcctcttcgctgacacccacatccctggctccccattcaaggcccacgtggttccctgctttgacgcatccaaagtcaagtgctcaggccccgggctggagcgggccaccgctggggaggtgggccaattccaagtggactgctcgagcgcgggcagcgcggagctgaccattgagatctgctcggaggcggggcttccggccgaggtgtacatccaggaccacggtgatggcacgcacaccattacctacattcccctctgccccggggcctacaccgtcaccatcaagtacggcggccagcccgtgcccaacttccccagcaagctgcaggtggaacctgcggtggacacttccggtgtccagtgctatgggcctggtattgagggccagggtgtcttccgtgaggccaccactgagttcagtgtggacgcccgggctctgacacagaccggagggccgcacgtcaaggcccgtgtggccaacccctcaggcaacctgacggagacctacgttcaggaccgtggcgatggcatgtacaaagtggagtacacgccttacgaggagggactgcactccgtggacgtgacctatgacggcagtcccgtgcccagcagccccttccaggtgcccgtgaccgagggctgcgacccctcccgggtgcgtgtccacgggccaggcatccaaagtggcaccaccaacaagcccaacaagttcactgtggagaccaggggagctggcacgggcggcctgggcctggctgtagagggcccctccgaggccaagatgtcctgcatggataacaaggacggcagctgctcggtcgagtacatcccttatgaggctggcacctacagcctcaacgtcacctatggtggccatcaagtgccaggcagtcctttcaaggtccctgtgcatgatgtgacagatgcgtccaaggtcaagtgctctgggcccggcctgagcccaggcatggttcgtgccaacctccctcagtccttccaggtggacacaagcaaggctggtgtggccccattgcaggtcaaagtgcaagggcccaaaggtgagtgtttgcatgcctggagccaggggtcaggagggcagtgtcctgtttgagggccgggaaaggaaactggaggcccaaagtgaggaccagagtgcagaggtggtgcaagtgtgtaggtgtttttggaagagcctcaggtgacagtgcagccaggtgggggacttggaggaggtagagcagatgggactggtcactgagcagatgtggcaggaaggcaggcaggcaagggtcccagctggcacccagatgggtgtctttcgtgccagagggggtcaaggccattcccagggtcgggtggatgaggataaagcgaggtctaggcctggggctgggtcctggccgtccagtgtggtggggtaggaatggaggcccaggagactagctgatgctctgtccctggggctggggccaggcctggtggagccagtggacgtggtagacaacgctgatggcacccagaccgtcaattatgtgcccagccgagaagggccctacagcatctcagtactgtatggagatgaagaggtaccccggagccccttcaaggtcaaggtgctgcctactcatgatgccagcaaggtgaaggccagtggccccgggctcaacaccactggcgtgcctgccagcctgcccgtggagttcaccatcgatgcaaaggacgccggggagggcctgctggctgtccagatcacggatcccgaaggcaagccgaagaagacacacatccaagacaaccatgacggcacgtatacagtggcctacgtgccagacgtgacaggtcgctacaccatcctcatcaagtacggtggtgacgagatccccttctccccgtaccgcgtgcgtgccgtgcccaccggggacgccagcaagtgcactgtcacagtgtcaatcggaggtcacgggctaggtgctggcatcggccccaccattcagattggggaggagacggtgatcactgtggacactaaggcggcaggcaaaggcaaagtgacgtgcaccgtgtgcacgcctgatggctcagaggtggatgtggacgtggtggagaatgaggacggcactttcgacatcttctacacggccccccagccgggcaaatacgtcatctgtgtgcgctttggtggcgagcacgtgcccaacagccccttccaagtgacggctctggctggggaccagccctcggtgcagccccctctacggtctcagcagctggccccacagtacacctacgcccagggcggccagcagacttgggccccggagaggcccctggtgggtgtcaatgggctggatgtgaccagcctgaggccctttgaccttgtcatccccttcaccatcaagaagggcgagatcacaggggaggttcggatgccctcaggcaaggtggcgcagcccaccatcactgacaacaaagacggcaccgtgaccgtgcggtatgcacccagcgaggctggcctgcacgagatggacatccgctatgacaacatgcacatcccaggaagccccttgcagttctatgtggattacgtcaactgtggccatgtcactgcctatgggcctggcctcacccatggagtagtgaacaagcctgccaccttcaccgtcaacaccaaggatgcaggagaggggggcctgtctctggccattgagggcccgtccaaagcagaaatcagctgcactgacaaccaggatgggacatgcagcgtgtcctacctgcctgtgctgccgggggactacagcattctagtcaagtacaatgaacagcacgtcccaggcagccccttcactgctcgggtcacaggtgacgactccatgcgtatgtcccacctaaaggtcggctctgctgccgacatccccatcaacatctcagagacggatctcagcctgctgacggccactgtggtcccgccctcgggccgggaggagccctgtttgctgaagcggctgcgtaatggccacgtggggatttcattcgtgcccaaggagacgggggagcacctggtgcatgtgaagaaaaatggccagcacgtggccagcagccccatcccggtggtgatcagccagtcggaaattggggatgccagtcgtgttcgggtctctggtcagggccttcacgaaggccacacctttgagcctgcagagtttatcattgatacccgcgatgcaggctatggtgggctcagcctgtccattgagggccccagcaaggtggacatcaacacagaggacctggaggacgggacgtgcagggtcacctactgccccacagagccaggcaactacatcatcaacatcaagtttgccgaccagcacgtgcctggcagccccttctctgtgaaggtgacaggcgagggccgggtgaaagagagcatcacccgcaggcgtcgggctccttcagtggccaacgttggtagtcattgtgacctcagcctgaaaatccctgaaattagcatccaggatatgacagcccaggtgaccagcccatcgggcaagacccatgaggccgagatcgtggaaggggagaaccacacctactgcatccgctttgttcccgctgagatgggcacacacacagtcagcgtgaagtacaagggccagcacgtgcctgggagccccttccagttcaccgtggggcccctaggggaagggggagcccacaaggtccgagctgggggccctggcctggagagagctgaagctggagtgccagccgaattcagtatctggacccgggaagctggtgctggaggcctggccattgctgtcgagggccccagcaaggctgagatctcttttgaggaccgcaaggacggctcctgtggtgtggcttatgtggtccaggagccaggtgactacgaagtctcagtcaagttcaacgaggaacacattcccgacagccccttcgtggtgcctgtggcttctccgtctggcgacgcccgccgcctcactgtttctagccttcaggagtcagggctaaaggtcaaccagccagcctcttttgcagtcagcctgaacggggccaagggggcgatcgatgccaaggtgcacagcccctcaggagccctggaggagtgctatgtcacagaaattgaccaagataagtatgctgtgcgcttcatccctcgggagaatggcgtttacctgattgacgtcaagttcaacggcacccacatccctggaagccccttcaagatccgagttggggagcctgggcatggaggggacccaggcttggtgtctgcttacggagcaggtctggaaggcggtgtcacagggaacccagctgagttcgtcgtgaacacgagcaatgcgggagctggtgccctgtcggtgaccattgacggcccctccaaggtgaagatggattgccaggagtgccctgagggctaccgcgtcacctatacccccatggcacctggcagctacctcatctccatcaagtacggcggcccctaccacattgggggcagccccttcaaggccaaagtcacaggcccccgtctcgtcagcaaccacagcctccacgagacatcatcagtgtttgtagactctctgaccaaggccacctgtgccccccagcatggggccccgggtcctgggcctgctgacgccagcaaggtggtggccaagggcctggggctgagcaaggcctacgtaggccagaagagcagcttcacagtagactgcagcaaagcaggcaacaacatgctgctggtgggggttcatggcccaaggaccccctgcgaggagatcctggtgaagcacgtgggcagccggctctacagcgtgtcctacctgctcaaggacaagggggagtacacactggtggtcaaatggggggacgagcacatcccaggcagcccctaccgcgttgtggtgccctgagtctggggcccgtgccagccggcagcccccaagcctgccccgctacccaagcagccccgccctcttcccctcaaccccggcccaggccgccctggccgcccgcctgtcactgcagccgcccctgccctgtgccgtgctgcgctcacctgcctccccagccagccgctgacctctcggctttcacttgggcagagggagccatttggtggcgctgcttgtcttctttggttctgggaggggtgagggatgggggtcctgtacacaaccacccactagttctcttctccagccaagaggaataaagttttgcttccattct

SEQ ID NO: 740 - DNA, 9448 bp, Homo sapiens
gcgatccgggcgccaccccgcggtcatcggtcaccggtcgctctcaggaacagcagcgcaacctctgctccctgcctcgcctcccgcgcgcctaggtgcctgcgactttaattaaagggccgtcccctcgccgaggctgcagcaccgcccccccggcttctcgcgcctcaaaatgagtagctcccactctcgggcgggccagagcgcagcaggcgcggctccgggcggcggcgtcgacacgcgggacgccgagatgccggccaccgagaaggacctggcggaggacgcgccgtggaagaagatccagcagaacactttcacgcgctggtgcaacgagcacctgaagtgcgtgagcaagcgcatcgccaacctgcagacggacctgagcgacgggctgcggcttatcgcgctgttggaggtgctcagccagaagaagatgcaccgcaagcacaaccagcggcccactttccgccaaatgcagcttgagaacgtgtcggtggcgctcgagttcctggaccgcgagagcatcaaactggtgtccatcgacagcaaggccatcgtggacgggaacctgaagctgatcctgggcctcatctggaccctgatcctgcactactccatctccatgcccatgtgggacgaggaggaggatgaggaggccaagaagcagacccccaagcagaggctcctgggctggatccagaacaagctgccgcagctgcccatcaccaacttcagccgggactggcagagcggccgggccctgggcgccctggtggacagctgtgccccgggcctgtgtcctgactgggactcttgggacgccagcaagcccgttaccaatgcgcgagaggccatgcagcaggcggatgactggctgggcatcccccaggtgatcacccccgaggagattgtggaccccaacgtggacgagcactctgtcatgacctacctgtcccagttccccaaggccaagctgaagccaggggctcccttgcggcccaaactgaacccgaagaaagcccgtgcctacgggccaggcatcgagcccacaggcaacatggtgaagaagcgggcagagttcactgtggagaccagaagtgctggccagggagaggtgctggtgtacgtggaggacccggccggacaccaggaggaggcaaaagtgaccgccaataacgacaagaaccgcaccttctccgtctggtacgtccccgaggtgacggggactcataaggttactgtgctctttgctggccagcacatcgccaagagccccttcgaggtgtacgtggataagtcacagggtgacgccagcaaagtgacagcccaaggtcccggcctggagcccagtggcaacatcgccaacaagaccacctactttgagatctttacggcaggagctggcacgggcgaggtcgaggttgtgatccaggaccccatgggacagaagggcacggtagagcctcagctggaggcccggggcgacagcacataccgctgcagctaccagcccaccatggagggcgtccacaccgtgcacgtcacgtttgccggcgtgcccatccctcgcagcccctacactgtcactgttggccaagcctgtaacccgagtgcctgccgggcggttggccggggcctccagcccaagggtgtgcgggtgaaggagacagctgacttcaaggtgtacacaaagggcgctggcagtggggagctgaaggtcaccgtgaagggccccaagggagaggagcgcgtgaagcagaaggacctgggggatggcgtgtatggcttcgagtattaccccatggtccctggaacctatatcgtcaccatcacgtggggtggtcagaacatcgggcgcagtcccttcgaagtgaaggtgggcaccgagtgtggcaatcagaaggtacgggcctggggccctgggctggagggcggcgtcgttggcaagtcagcagactttgtggtggaggctatcggggacgacgtgggcacgctgggcttctcggtggaagggccatcgcaggctaagatcgaatgtgacgacaagggcgacggctcctgtgatgtgcgctactggccgcaggaggctggcgagtatgccgttcacgtgctgtgcaacagcgaagacatccgcctcagccccttcatggctgacatccgtgacgcgccccaggacttccacccagacagggtgaaggcacgtgggcctggattggagaagacaggtgtggccgtcaacaagccagcagagttcacagtggatgccaagcacggtggcaaggccccacttcgggtccaagtccaggacaatgaaggctgccctgtggaggcgttggtcaaggacaacggcaatggcacttacagctgctcctacgtgcccaggaagccggtgaagcacacagccatggtgtcctggggaggcgtcagcatccccaacagccccttcagggtgaatgtgggagctggcagccaccccaacaaggtcaaagtatacggccccggagtagccaagacagggctcaaggcccacgagcccacctacttcactgtggactgcgccgaggctggccagggggacgtcagcatcggcatcaagtgtgcccctggagtggtaggccccgccgaagctgacatcgacttcgacatcatccgcaatgacaatgacaccttcacggtcaagtacacgccccggggggctggcagctacaccattatggtcctctttgctgaccaggccacgcccaccagccccatccgagtcaaggtggagccctctcatgacgccagtaaggtgaaggccgagggccctggcctcagtcgcactggtgtcgagcttggcaagcccacccacttcacagtaaatgccaaagctgctggcaaaggcaagctggacgtccagttctcaggactcaccaagggggatgcagtgcgagatgtggacatcatcgaccaccatgacaacacctacacagtcaagtacacgcctgtccagcagggtccagtaggcgtcaatgtcacttatggaggggatcccatccctaagagccctttctcagtggcagtatctccaagcctggacctcagcaagatcaaggtgtctggcctgggagagaaggtggacgttggcaaagaccaggagttcacagtcaaatcaaagggtgctggtggtcaaggcaaagtggcatccaagattgtgggcccctcgggtgcagcggtgccctgcaaggtggagccaggcctgggggctgacaacagtgtggtgcgcttcctgccccgtgaggaagggccctatgaggtggaggtgacctatgacggcgtgcccgtgcctggcagcccctttcctctggaagctgtggcccccaccaagcctagcaaggtgaaggcgtttgggccggggctgcagggaggcagtgcgggctcccccgcccgcttcaccatcgacaccaagggcgccggcacaggtggcctgggcctgacggtggagggcccctgtgaggcgcagctcgagtgcttggacaatggggatggcacatgttccgtgtcctacgtgcccaccgagcccggggactacaacatcaacatcctcttcgctgacacccacatccctggctccccattcaaggcccacgtggttccctgctttgacgcatccaaagtcaagtgctcaggccccgggctggagcgggccaccgctggggaggtgggccaattccaagtggactgctcgagcgcgggcagcgcggagctgaccattgagatctgctcggaggcggggcttccggccgaggtgtacatccaggaccacggtgatggcacgcacaccattacctacattcccctctgccccggggcctacaccgtcaccatcaagtacggcggccagcccgtgcccaacttccccagcaagctgcaggtggaacctgcggtggacacttccggtgtccagtgctatgggcctggtattgagggccagggtgtcttccgtgaggccaccactgagttcagtgtggacgcccgggctctgacacagaccggagggccgcacgtcaaggcccgtgtggccaacccctcaggcaacctgacggagacctacgttcaggaccgtggcgatggcatgtacaaagtggagtacacgccttacgaggagggactgcactccgtggacgtgacctatgacggcagtcccgtgcccagcagccccttccaggtgcccgtgaccgagggctgcgacccctcccgggtgcgtgtccacgggccaggcatccaaagtggcaccaccaacaagcccaacaagttcactgtggagaccaggggagctggcacgggcggcctgggcctggctgtagagggcccctccgaggccaagatgtcctgcatggataacaaggacggcagctgctcggtcgagtacatcccttatgaggctggcacctacagcctcaacgtcacctatggtggccatcaagtgccaggcagtcctttcaaggtccctgtgcatgatgtgacagatgcgtccaaggtcaagtgctctgggcccggcctgagcccaggcatggttcgtgccaacctccctcagtccttccaggtggacacaagcaaggctggtgtggccccattgcaggtcaaagtgcaagggcccaaaggcctggtggagccagtggacgtggtagacaacgctgatggcacccagaccgtcaattatgtgcccagccgagaagggccctacagcatctcagtactgtatggagatgaagaggtaccccggagccccttcaaggtcaaggtgctgcctactcatgatgccagcaaggtgaaggccagtggccccgggctcaacaccactggcgtgcctgccagcctgcccgtggagttcaccatcgatgcaaaggacgccggggagggcctgctggctgtccagatcacggatcccgaaggcaagccgaagaagacacacatccaagacaaccatgacggcacgtatacagtggcctacgtgccagacgtgacaggtcgctacaccatcctcatcaagtacggtggtgacgagatccccttctccccgtaccgcgtgcgtgccgtgcccaccggggacgccagcaagtgcactgtcacagtgtcaatcggaggtcacgggctaggtgctggcatcggccccaccattcagattggggaggagacggtgatcactgtggacactaaggcggcaggcaaaggcaaagtgacgtgcaccgtgtgcacgcctgatggctcagaggtggatgtggacgtggtggagaatgaggacggcactttcgacatcttctacacggccccccagccgggcaaatacgtcatctgtgtgcgctttggtggcgagcacgtgcccaacagccccttccaagtgacggctctggctggggaccagccctcggtgcagccccctctacggtctcagcagctggccccacagtacacctacgcccagggcggccagcagacttgggccccggagaggcccctggtgggtgtcaatgggctggatgtgaccagcctgaggccctttgaccttgtcatccccttcaccatcaagaagggcgagatcacaggggaggttcggatgccctcaggcaaggtggcgcagcccaccatcactgacaacaaagacggcaccgtgaccgtgcggtatgcacccagcgaggctggcctgcacgagatggacatccgctatgacaacatgcacatcccaggaagccccttgcagttctatgtggattacgtcaactgtggccatgtcactgcctatgggcctggcctcacccatggagtagtgaacaagcctgccaccttcaccgtcaacaccaaggatgcaggagaggggggcctgtctctggccattgagggcccgtccaaagcagaaatcagctgcactgacaaccaggatgggacatgcagcgtgtcctacctgcctgtgctgccgggggactacagcattctagtcaagtacaatgaacagcacgtcccaggcagccccttcactgctcgggtcacaggtgacgactccatgcgtatgtcccacctaaaggtcggctctgctgccgacatccccatcaacatctcagagacggatctcagcctgctgacggccactgtggtcccgccctcgggccgggaggagccctgtttgctgaagcggctgcgtaatggccacgtggggatttcattcgtgcccaaggagacgggggagcacctggtgcatgtgaagaaaaatggccagcacgtggccagcagccccatcccggtggtgatcagccagtcggaaattggggatgccagtcgtgttcgggtctctggtcagggccttcacgaaggccacacctttgagcctgcagagtttatcattgatacccgcgatgcaggctatggtgggctcagcctgtccattgagggccccagcaaggtggacatcaacacagaggacctggaggacgggacgtgcagggtcacctactgccccacagagccaggcaactacatcatcaacatcaagtttgccgaccagcacgtgcctggcagccccttctctgtgaaggtgacaggcgagggccgggtgaaagagagcatcacccgcaggcgtcgggctccttcagtggccaacgttggtagtcattgtgacctcagcctgaaaatccctgaaattagcatccaggatatgacagcccaggtgaccagcccatcgggcaagacccatgaggccgagatcgtggaaggggagaaccacacctactgcatccgctttgttcccgctgagatgggcacacacacagtcagcgtgaagtacaagggccagcacgtgcctgggagccccttccagttcaccgtggggcccctaggggaagggggagcccacaaggtccgagctgggggccctggcctggagagagctgaagctggagtgccagccgaattcagtatctggacccgggaagctggtgctggaggcctggccattgctgtcgagggccccagcaaggctgagatctcttttgaggaccgcaaggacggctcctgtggtgtggcttatgtggtccaggagccaggtgactacgaagtctcagtcaagttcaacgaggaacacattcccgacagccccttcgtggtgcctgtggcttctccgtctggcgacgcccgccgcctcactgtttctagccttcaggtgaggcaccgagagaaaccgcccacctggggctcctgggcccggacagaccagagccaccgcagagaccaggccttggccctgtgttcagtgacccccctggcccagctctgggttccaggcctctgctctggccgggtgcagcccacgcttggggtcggcaggaaatatcctgcccaccacgtggagtttttctcgtgtctcaggtctaaaggctttgaacagaagcctgtgccccttgagcaccagggctgcggtttaaagagggacagcctgccaaggctgggtgctgcccacagggtggggcagccctcccttcctgccacctgggtgtgtgcgacggcagagtgtgggggcaggggcggggatgtgcgcctgtggcttgctgccccttgcaaatcagtggctctccctctttaaaccaagttggacgccagatgggtaagtgcgacccgcgggcctcttgctcctggggcctttccgtcctcccttgccctggctcaagcacccccatctaaccatgtctgctgtgcttccaggagtcagggctaaaggtcaaccagccagcctcttttgcagtcagcctgaacggggccaagggggcgatcgatgccaaggtgcacagcccctcaggagccctggaggagtgctatgtcacagaaattgaccaaggtgaggccctgtccctgcccggccgccctgccctgctggctggaagcaggctgagagtacaaaaggaaggtaccgcttctgtaagcagccaagacggggccccaactcctgggccccctaagccaggcaaccctttcccaattggtgacccaagccgctggggatgtggctcgccacccacagctattaggaaggccttctaccctgcagtaccatgccatctccacagggaaagactcaaagtccagcctcagtgctgcccggcccttcagccacggccatggtacttgtgcacaggcctggggcagccttgtgggtaggaggagcccagtgggcttcatttcacggcctagtcctgcccttcccagctgcatgacctgaagcaagttcctgcccgtctctgagcctgttaacatgcaggggatatggtgttcacggtaacctttcttaggaggcagcaaggcctgggtttggcttgtaaaagatttccgtcccaatgcaccctgacggtgggcagcttgagtgtctaaaccttcggccctcaggaggtctgctgcggggtgcaggtgcccagcgtggctgggctcacactgatggaccggcaaaatggggagggccagggttgaggctgttcctcacagacaccatctgctggtttgaggaggggccccaggcccacagcatgactccctgctcctcagataagtatgctgtgcgcttcatccctcgggagaatggcgtttacctgattgacgtcaagttcaacggcacccacatccctggaagccccttcaagatccgagttggggagcctgggcatggaggggacccaggcttggtgtctgcttacggagcaggtctggaaggcggtgtcacagggaacccagctgagttcgtcgtgaacacgagcaatgcgggagctggtgccctgtcggtgaccattgacggcccctccaaggtgaagatggattgccaggagtgccctgagggctaccgcgtcacctatacccccatggcacctggcagctacctcatctccatcaagtacggcggcccctaccacattgggggcagccccttcaaggccaaagtcacaggcccccgtctcgtcagcaaccacagcctccacgagacatcatcagtgtttgtagactctctgaccaaggccacctgtgccccccagcatggggccccgggtcctgggcctgctgacgccagcaaggtggtggccaagggcctggggctgagcaaggcctacgtaggccagaagagcagcttcacagtagactgcagcaaagcaggcaacaacatgctgctggtgggggttcatggcccaaggaccccctgcgaggagatcctggtgaagcacgtgggcagccggctctacagcgtgtcctacctgcgctcacctgcctccccagccagccgctgacctctcggctttcacttgggcagagggagccatttggtggcgctgcttgtcttctttggttctgggaggggtgagggatgggggtcctgtacacaaccacccactagttctcttctccagccaagaggaataaagttttgcttccattc

SEQ ID NO: 741 - DNA, 1089 bp, Homo sapiens
atgcgggtcacggcgccccgaaccgtcctcctgctgctctcgggagccctggccctgaccgagacctgggccggctcccactccatgaggtatttctacaccgccatgtcccggcccggccgcggggagccccgcttcatcgcagtgggctacgtggacgacacccagttcgtgaggttcgacagcgacgccgcgagtccgaggatggcgccccgggcgccatggatagagcaggaggggccggagtattgggaccgggagacacagaagtacaagcgccaggcacagactgaccgagtgagcctgcggaacctgcgcggctactacaaccagagcgaggccgggtctcacaccctccagaggatgtacggctgcgacgtggggccggacgggcgcctcctccgcgggcatgaccagtccgcctacgacggcaaggattacatcgccctgaacgaggacctgagctcctggaccgcggcggacacggcggctcagatcacccagcgcaagtgggaggcggcccgtgaggcggagcagtggagagcctacctggagggcctgtgcgtggagtggctccgcagatacctggagaacgggaaggagacgctgcagcgcgcggaccccccaaagacacatgtgacccaccaccccatctctgaccatgaggccaccctgaggtgctgggccctgggcttctaccctgcggagatcacactgacctggcagcgggatggcgaggaccaaactcaggacaccgagcttgtggagaccagaccagcaggagatagaaccttccagaagtgggcagctgtggtggtgccttctggagaagagcagagatacacatgccatgtacagcatgaggggctgccgaagcccctcaccctgagatgggagccatcttcccagtccaccatccccatcgtgggcattgttgctggcctggctgtcctagcagttgtggtcatcggagctgtggtcgctactgtgatgtgtaggaggaagagctcaggtggaaaaggagggagctactctcaggctgcgtccagcgacagtgcccagggctctgatgtgtctctcacagcttga

SEQ ID NO: 742 - DNA, 3714 bp, Homo sapiens
  misc_feature (75)..(76): n is a, c, g, or t
aatctgcgtcgggtccttcttcctgaatgactcatgacgcgtccccaattcccactcccattgggtgtcggaccnntctagaaggccggtcagcgtctccgcagtcccggttctgaagtccccagtcacccacccggactcagattctccccagacgccgagatgcgggtcatggcgccccggaccctcatcctgctgctctcgggagccctggccctgaccgagacctgggccggtgagtgcggggttgggagggaatcggcctcttgcggagaggagcgaggggcccgcccggcggagggcgcaggacccggggagccgcgcagggaggagggtcgggcgggtctcagcccctcctcgccccaggctcccactccatgaggtatttctgcaccgctgtgtcccggcccggacgcggggagccccacttcatcgccgtgggctacgtggacgacacgcagttcgtgcggttcgacagcgacgacgagagtccgagaggggagccgagggcgccgtgggtggagcggaaggggccggagtattgggaccgggagacacagaagtacaagccccaggcacagactgaccgagtgagcctgcggaacctgcgcggctactacaaccagagcgaggccggtgagtggaccccggcccggggcgcaggtcacgacccctcctcatcccccacggacggcccgggtcgccccaagtctcccggtctgagatccaccccgaggctgcggaacccgagaccctcgaccggagagagccccagtcacctttacccggtttcattttcagtttaggccaaaatccccgcgggttggtcggggcggggcggggctcgggggacggggctgaccgcgggggcgggccagggtctcacatcatccagaggatgtatggctgcgacgtggggcccgacgggcgcctcctccgcgggtatgaccagcacgcctacgacggcaaggattacatcgccctgaacgaggatctgcgctcctggaccgccgcgaacacggcggctcagatcacccagcgcaagtgggaggcggcccgtgaggcggagcagctgagagcctacttggagggcctgtgcgtggagtggctccgcagatacctgaagaatgggaaggagacgctgcagggcgcgggtaccaggggcagtgggagcgttccccatctcctgtagatctcccgggatggcctcccacgaggaggggaggaaaatgggatcagcgctagaatatcgccctcccttgaatggagaatgggatgagttttcctgagtttcctctgagggccccctctgctctctgaggacaattaagggatgaagtccttgaagaaatggaggggaagacagtccctagaatactcatcaggggtcccctttgaccactttgaccactgcagcagctgtggtcaggctgctgacctttctctcaggccttgttctctgcctcacgctcaatgtgtttgaaggtttgattccagcttttctgagtccttcggcctccactcaggtcaggaccagaagtcgctgttcctccctcagagactagaactttccaatgaataggagattatcccaggtgcctgtgtccaggctggcgtctgggttctgtgcccccttccccaccccaggtgtcctgtccgttctcaggatggtcacatgggcgctgttggagtgtcgcaagagagatacaaagtgtctgaattttctgactcttcccgtcagaacacccaaagacacacgtgacccaccatcccgtctctgaccatgaggccaccctgaggtgctgggccctgggcttctaccctgcggagatcacactgacctggcagtgggatggggaggaccaaactcaggacactgagcttgtggagaccaggccagcaggagatggaaccttccagaagtgggcagctgtggtggtgccttctggagaagagcagagatacacgtgccatgtgcagcacgaggggctgccggagcccctcaccctgagatggggtaaggagggggatgaggggtgatgtgtcttctcagggaaagcagaagtcctggagcccttcagccaggtcagggctgaggcttgggggtcagggcccctcaccttcccctcctttcccagagccgtcttcccagcccaccatccccatcgtgggcatcgttgctggcctggctgtcctggctgtcctagctgtcctaggagctgtggtggctgttgtgatgtgtaggaggaagagctcaggtagggaaggggtgaggagtggggtctgggttttcttgttccactgggagtttcaagccccaggtagaagtgtgccccacctcgttactggaagcaccatccacacatgggccccatcccagcctgggaccctatgtgccagcacttactctgttgtgaagcacatgacaatgaaggacagatgtatcaccttgatgattatggtgttggggtccttgattccagcattcatgagtcaggggaaggtccctgctaaggacagaccttaggagggcagttgctccaacaaccacagctgctttccccgtgtttcctgatcctgccctgggtctgcagtcatagttctggaaacttctcttgggtccaagactaggaggttcccctaagatcgcatggccctgactcctccctgtcccctcacagggcattttcttcccacaggtggaaaaggagggagctgctctcaggctgcgtgtaagtgatggcggtgggcgtgtggaggagctgctctcaggctgcgtgtaagtgatggcggtgggcgtgtggaggagctcacccaccccataattcctcttgtcccacatctcctgcgggctctgaccaggtctttttttttgttctaccccagccagcaacagtgcccagggctctgatgagtctctcatcgcttgtaaaggtgagattctggggagctgaagtggtcgggggtggggcagagggaaaaggcctaggtaatggggatcctttgattgggacgtttcgaatgtgtggtgagctgttcagagtgtgatcacttaccatgactgacctgaatttgttcatgactattgtgttctgtagcctgagacagctgcctgtgtgggactgagatgcaggatttcttcacacctctcctttgtgacttcaagagcctctggcatctctttctgcaaaggcatctgaatgtgtctgcgttcctgttagcataatgtgaggaggtggagagacagcccaccccctgtccaccgtgacccctgtccccacactgacctgtgttccctccccgatcatctttcctgttccagagaagtgggctggatgtctccatctctgtctcaacttcatggtgcgctgagctgcaacttcttacttccctaatgaagttaggaacctgaatataaatttgttttctcaaatatttgctatgaagggttgatggattaattaaataagtcaattcctggaagttgagagagcaaataaagacctgagaagctttccagaatccgcatgttctctgtggctgagtctgttgcaggtgggggtggggaaggctgtgaggagccgagtgtggacgggggcctgtgcctagttgctgttcagttcttcatgggctttatgtagtcagtccttagctgggtcaccttcactgctccattgtccttgtcccttcagtggaaacttgtccagcaggagc

SEQ ID NO: 743 - DNA, 1561 bp, Homo sapiens
agttctaaagtccccacgcacccacccggactcagaatctcctcagacgccgagatgcgggtcacggcgccccgaaccctcctcctgctgctctggggggcagtggccctgaccgagacctgggccggctcccactccatgaggtatttctacaccgccatgtcccggcccggccgcggggagccccgcttcatcaccgtgggctacgtggacgacacccagttcgtgaggttcgacagcgacgccacgagtccgaggatggcgccccgggcgccatggatagagcaggaggggccggagtattgggaccgggagacacagatctccaagaccaacacacagacttaccgagagaacctgcgcaccgcgctccgctactacaaccagagcgaggccgggtctcacatcatccagaggatgtacggctgcgacgtggggccggacgggcgcctcctccgcgggtatgaccaggacgcctacgacggcaaggattacatcgccctgaacgaggacctgagctcctggaccgcggcggacaccgcggctcagatcacccagcgcaagtgggaggcggcccgtgtggcggagcagctgagagcctacctggagggcctgtgcgtggagtggctccgcagatacctggagaacgggaaggagacgctgcagcgcgcggaccccccaaagacacacgtgacccaccaccccatctctgaccatgaggccaccctgaggtgctgggccctgggcttctaccctgcggagatcacactgacctggcagcgggatggcgaggaccaaactcaggacactgagcttgtggagaccagaccagcaggagatagaaccttccagaagtgggcagctgtggtggtgccttctggagaagagcagagatacacatgccatgtacagcatgaggggctgccgaagcccctcaccctgagatgggagccgtcttcccagtccaccgtccccatcgtgggcattgttgctggcctggctgtcctagcagttgtggtcatcggagctgtggtcgctgctgtgatgtgtaggaggaagagctcaggtggaaaaggagggagctactctcaggctgcgtgcagcgacagtgcccagggctctgatgtgtctctcacagcttgaaaagcctgagacagctgtcttgtgagggactgagatgcaggatttcttcacgcctcccctttgtgacttcaagagcctctggcatctctttctgcaaaggcacctgaatgtgtctgcgtccctgttagcataatgtgaggaggtggagagacagcccacccttgtgtccactgtgacccctgttcccatgctgacctgtgtttcctccccagtcatctttcttgttccagagaggtggggctggatgtctccatctctgtctcaactttatgtgcactgagctgcaacttcttacttccctactgaaaataagaatctgaatataaatttgttttctcaaatatttgctatgagaggttgatggattaattaaataagtcaattcctggaatttgagagagcaaataaagacctgaga

SEQ ID NO: 744 - DNA, 1089 bp, Homo sapiens
atgcgggtcacggcaccccgaaccgtcctcctgctgctctggggggcagtggccctgaccgagacctgggccggctcccactccatgaggtatttctacaccgccatgtcccggcccggccgcggggagccccgcttcatcgcagtgggctacgtggacgacacccagttcgtgaggttcgacagcgacgccgcgagtccgaggatggcgccccgggcgccatggatagagcaggaggggccggagtattgggacggggagacacggaacatgaaggcctccgcgcagacttaccgagagaacctgcggatcgcgctccgctactacaaccagagcgaggccgggtctcacatcatccaggtgatgtatggctgcgacgtggggccggacgggcgcctcctccgcgggcatgaccagtccgcctacgacggcaaggattacatcgccctgaacgaggacctgagctcctggaccgcggcggacacggcggctcagatcacccagcgcaagtgggaggcggcccgtgtggcggagcagctgagagcctacctggagggcctgtgcgtggagtggctccgcagatacctggagaacgggaaggagacgctgcagcgcgcggaccccccaaagacacatgtgacccaccaccccatctctgaccatgaggccaccctgaggtgctgggccctgggcttctaccctgcggagatcacactgacctggcagcgggatggcgaggaccaaactcaggacaccgagcttgtggagaccagaccagcaggagatagaaccttccagaagtgggcagctgtggtggtgccttctggagaagagcagagatacacatgccatgtacagcatgaggggctgccaaagcccctcaccctgagatgggagccatcttcccaatccaccgtccccatcgtgggcattgttgctggcctggctgtcctagcagttgtggtcatcggagctgtggtcgctgctgtgatgtgtaggaggaagagctcaggtggaaaaggagggagctactctcaggctgcgtgcagcgacagtgcccagggctctgatgtgtctctcacagcttga

SEQ ID NO: 745 - DNA, 1093 bp, Homo sapiens
atgcgggtcacggcgccccgaaccgtcctcctgctgctctggggggcagtggccctgaccgagacctgggccggctcccactccatgaggtatttctacaccgccatgtcccggcccggccgcggggagccccgcttcattgcagtgggctacgtggacgacacccagttcgtgaggttcgacagcgacgccgcgagtccgaggacggagccccgggcgccatggatagagcaggaggggccggagtattgggaccggaacacacagatcttcaagaccaacacacagacttaccgagagaacctgcggatcgcgctccgctactacaaccagagcgaggccgggtctcacacttggcagacgatgtatggctgcgacgtggggccggacgggcgcctcctccgcgggcataaccagtacgcctacgacggcaaagattacatcgccctgaacgaggacctgagctcctggaccgcggcggacaccgcggctcagatcacccagcgcaagtgggaggcggcccgtgaggcggagcagctgagagcctacctggagggcctgtgcgtggagtggctccgcagacacctggagaacgggaaggagacgctgcagcgcgcggaccccccaaagacacacgtgacccaccaccccgtctctgaccatgaggccaccctgaggtgctgggccctgggcttctaccctgcggagatcacactgacctggcagcgggatggcgaggaccaaactcaggacactgagcttgtggagaccagaccagcaggagatagaaccttccagaagtgggcagctgtggtggtgccttctggagaagagcagagatacacatgccatgtacagcatgaggggctgccgaagcccctcaccctgagatgggagccatcttcccagtccaccatccccatcgtgggcattgttgctggcctggctgtcctagcagttgtggtcatcggagctgtggtcgctactgtgatgtgtaggaggaagagctcaggtggaaaaggagggagctactctcaggctgcgtccagcgacagtgcccagggctctgatgtgtctctcacagcttgaaaag

SEQ ID NO: 746 - DNA, 1157 bp, Homo sapiens
agttctaaagtccccacgcacccacccggactcagaatctcctcagacgccgagatgcgggtcacggcgccccgaaccctcctcctgctgctctggggggcagtggccctgaccgagacctgggccggctcccactccatgaggtatttctacaccgccatgtcccggcccggccgcggggagccccgcttcatcaccgtgggctacgtggacgacacccagttcgtgaggttcgacagcgacgccacgagtccgaggatggcgccccgggcgccatggatagagcaggaggggccggagtattgggaccgggagacacagatctccaagaccaacacacagacttaccgagagaacctgcgcaccgcgctccgctactacaaccagagcgaggccgggtctcacatcatccagaggatgtacggctgcgacgtggggccggacgggcgcctcctccgcgggtatgaccaggacgcctacgacggcaaggattacatcgccctgaacgaggacctgagctcctggaccgcggcggacaccgcggctcagatcacccagcgcaagtgggaggcggcccgtgtggcggagcagctgagagcctacctggagggcctgtgcgtggagtggctccgcagatacctggagaacgggaaggagacgctgcagcgcgcggaccccccaaagacacacgtgacccaccaccccatctctgaccatgaggccaccctgaggtgctgggccctgggcttctaccctgcggagatcacactgacctggcagcgggatggcgaggaccaaactcaggacactgagcttgtggagaccagaccagcaggagatagaaccttccagaagtgggcagctgtggtggtgccttctggagaagagcagagatacacatgccatgtacagcatgaggggctgccgaagcccctcaccctgagatgggagccgtcttcccagtccaccgtccccatcgtgggcattgttgctggcctggctgtcctagcagttgtggtcatcggagctgtggtcgctgctgtgatgtgtaggaggaagagctcaggtggaaaaggagggagctactctcaggctgcgtgcagcgacagtgcccagggctctgatgtgtctctcacagcttgaaaaggtgagattct

SEQ ID NO: 747 - DNA, 1089 bp, Homo sapiens
atgcgggtcacggcgccccgaaccgtcctcctgctgctctggggggcagtggccctgaccgagacctgggccggctcccactccatgaggtatttctacaccgccatgtcccggcccggccgcggggagccccgcttcattgcagtgggctacgtggacgacacccagttcgtgaggttcgacagcgacgccgcgagtccgaggacggagccccgggcgccatggatagagcaggaggggccggagtattgggaccggaacacacagatcttcaagaccaacacacagacttaccgagagaacctgcggatcgcgctccgctactacaaccagagcgaggccgggtctcacatcatccagaggatgtatggctgcgacgtggggccggacgggcgcctcctccgcgggcataaccagtacgcctacgacggcaaagattacatcgccctgaacgaggacctgagctcctggaccgcggcggacaccgcggctcagatcacccagcgcaagtgggaggcggcccgtgaggcggagcagctgagagcctacctggagggcctgtgcgtggagtggctccgcagacacctggagaacgggaaggagacgctgcagcgcgcggaccccccaaagacacacgtgacccaccaccccgtctctgaccatgaggccaccctgaggtgctgggccctgggcttctaccctgcggagatcacactgacctggcagcgggatggcgaggaccaaactcaggacactgagcttgtggagaccagaccagcaggagatagaaccttccagaagtgggcagctgtggtggtgccttctggagaagagcagagatacacatgccatgtacagcatgaggggctgccgaagcccctcaccctgagatgggagccatcttcccagtccaccatccccatcgtgggcattgttgctggcctggctgtcctagcagttgtggtcatcggagctgtggtcgctactgtgatgtgtaggaggaagagctcaggtggaaaaggagggagctactctcaggctgcgtccagcgacagtgcccagggctctgatgtgtctctcacagcttga

SEQ ID NO: 748 - DNA, 1413 bp, Homo sapiens
tgctcccactccatgaggtatttcgacaccgccgtgtcccggcccggcgccggagagccccgcttcatctcagtgggctacgtggacgacacgcagttcgtgcggttcgacagcgacgccgcgagtccgagaggggagccgcgggcgccgtgggtggagcaggaggggccggagtattgggaccgggagacacagaagtacaagcgccaggcacaggctgaccgagtgagcctgcggaacctgcgcggctactacaaccagagcgaggacgggtctcacaccctccagaggatgtctggctgcgacctggggcccgacgggcgcctcctccgcgggtatgaccagtccgcctacgacggcaaggattacatcgccctgaacgaggacctgcgctcctggaccgcggcggacaccgcggctcagatcacccagcgcaagtgggaggcggcccgtgcggcggagcagctgagagcctacctggagggactgtgcgtggagtggctccgcagatacctggagaacgggaaggagacgctgcagcgcgcagaacccccaaagacacacgtgacccaccaccccctctctgaccatgaggccaccctgaggtgctgggccctgggcttctaccctgcggagatcacactgacctggcagcgggatggggaggaccagacccaggacaccgagcttgtggagaccaggccagcaggagatggaaccttccagaagtgggcagctgtggtggtgccttctggacaagagcagagatacacgtgccatatgcagcacgaggggctgcaagagcccctcaccctgagctgggagccatcttcccagcccaccatccccatcatgggcatcgttgctggcctggctgtcctggttgtcctagctgtccttggagctgtggtcaccgctatgatgtgtaggaggaagagctcaggtggaaaaggagggagctgctctcaggctgcgtgcagcaacagtgcccagggctctgatgagtctctcatcacttgtaaagcctgagacagctgcctgtgtgggactgagatgcaggatttcttcacacctctcctttgtgacttcaagagcctctggcatctctttctgcaaaggcacctgaatgtgtctgcgttcctgttagcataatgtgaggaggtggagagacagcccacccccgtgtccaccgtgacccctgtccccacactgacctgtgttccctccccgatcatctttcctgttccagagaggtggggctggatgtctccatctctgtctcaaattcatggtgcactgagctgcaacttcttacttccctaatgaagttaagaacctgaatataaatttgtgttctcaaatatttgctatgaagcgttgatggattaattaaataagtcaattcctaaaaac

SEQ ID NO: 749 - DNA, 1089 bp, Homo sapiens
atgcgggtcacggcgccccgaaccgtcctcctgctgctctggggggcagtggccctgaccgagacctgggccggctcccactccatgaggtatttctacaccgccatgtcccggcccggccgcggggagccccgcttcatcgcagtgggctacgtggacgacacccagttcgtgaggttcgacagcgacgccgcgagtccgaggacggagccccgggcgccatggatagagcaggaggggccggagtattgggaccggaacacacagatcttcaagaccaacacacagacttaccgagagagcctgcggaacctgcgcggctactacaaccagagcgaggccgggtctcacatcatccagaggatgtatggctgcgacctggggcccgacgggcgcctcctccgcgggcatgaccagtccgcctacgacggcaaggattacatcgccctgaacgaggacctgagctcctggaccgcggcggacaccgcggctcagatcacccagcgcaagtgggaggcggcccgtgtggcggagcagcggagagcctacctggagggcctgtgcgtggagtggctccgcagatacctggagaacgggaaggagacgctgcagcgcgcggaccccccaaagacacacgtgacccaccaccccgtctctgaccatgaggccaccctgaggtgctgggccctgggcttctaccctgcggagatcacactgacctggcagcgggatggcgaggaccaaactcaggacactgagcttgtggagaccagaccagcaggagatagaaccttccagaagtgggcagctgtggtggtgccttctggagaagagcagagatacacatgccatgtacagcatgaggggctgccgaagcccctcaccctgagatgggagccatcttcccagtccaccatccccatcgtgggcattgttgctggcctggctgtcctagcagttgtggtcatcggagctgtggtcgctactgtgatgtgtaggaggaagagctcaggtggaaaaggagggagctactctcaggctgcgtccagcgacagtgcccagggctctgatgtgtctctcacagcttga

SEQ ID NO: 750 - DNA, 1089 bp, Homo sapiens
atgcgggtcacggcaccccgaaccctcctcctgctgctctggggggccctggccctgaccgagacctgggccggctcccactccatgaggtatttctacaccgccatgtcccggcccggccgcggggagccccgcttcatcgcagtgggctacgtggacgacacgcagttcgtgaggttcgacagcgacgccgcgagtccgagagaggagccgcgggcgccgtggatagagcaggaggggccggagtattgggaccggaacacacagatctacaaggcccaggcacagactgaccgagagagcctgcggaacctgcgcggctactacaaccagagcgaggccgggtctcacacttggcagacgatgtatggctgcgacctggggccggacgggcgcctcctccgcgggcataaccagttagcctacgacggcaaggattacatcgccctgaacgaggacctgagctcctggaccgcggcggacaccgcggctcagatcacccagcgcaagtgggaggcggcccgtgtggcggagcagctgagagcctacctggagggcctgtgcgtggagtggctccgcagatacctggagaacgggaaggagacgctgcagcgcgcggaccccccaaagacacacgtgacccaccaccccatctctgaccatgaggccaccctgaggtgctgggccctgggcttctaccctgcggagatcacactgacctggcagcgggatggcgaggaccaaactcaggacactgagcttgtggagaccagaccagcaggagatagaaccttccagaagtgggcagctgtggtggtgccttctggagaagagcagagatacacatgccatgtacagcatgaggggctgccgaagcccctcaccctgagatgggagccatcttcccagtccaccatccccatcgtgggcattgttgctggcctggctgtcctagcagttgtggtcatcggagctgtggtcgctactgtgatgtgtaggaggaagagctcaggtggaaaaggagggagctactctcaggctgcgtccagcgacagtgcccagggctctgatgtgtctctcacagcttga

SEQ ID NO: 751 - DNA, 3950 bp, Homo sapiens
aatcattcagggattaccaatattgtgctacctactgtatcaataaacaaaaaggaaactggtctctatgagaatctctgtgtggtggcttcagacaaaacttcgccaggtttagagagaaaacccctgtctctacacctccattcccagggcgagctcactctctggcatcaagttctccgtgatcagtttccctacacaagatccaagaggagaggtaaggagtgagaggcagggagtccagttcagggacagggattccaggaggagaagtgaaggggaagcgggtcgggcagcctgggggtctctccctggtttccacagacagatccttgtgcaggactcaggcagacagtgtgacaaagaggctggtgtaggagaagagggatcaggacgaagtcccagccgcgggcggggctctcagggtctcaggctccgagagccttgtctgcattggggaggcgcagcgttggggattccccactcccacgagtttcacttcttctcccaacctatgtcgggtccttcttccaggatactcgtgacgcgtccccatttcccactccattgggtgtcggatatctagagaagccaatcagtgtcgccggggtcccagttctaaagtccccacgcacccacccggactcagaatctcctcagacgccgagatgcgggtcacggcgccccgaaccgtcctcctgctgctctggggggcagtggccctgaccgagacctgggccggtgagtgcggggtcgggagggaaatggcctctgtggggaggagcgaggggaccgcaggcgggggcgcaggacctgaggagccgcgccgggaggagggtcgggcgggtctcagcccctcctcgcccccaggctcccactccatgaggtatttctacaccgccatgtcccggcccggccgcggggagccccgcttcatcgcagtgggctacgtggacgacacccagttcgtgaggttcgacagcgacgccgcgagtccgaggacggagccccgggcgccatggatagagcaggaggggccggagtattgggaccggaacacacagatcttcaagaccaacacacagacttaccgagagagcctgcggaacctgcgcggctactacaaccagagcgaggccggtgagtgaccccggcccggggcgcaggtcacgactccccatcccccacgtacggcccggggtcgccccgagtctccgggtccgagatccgcctccctgaggccgcgggacccgcccagaccctcgaccggcgagagccccaggcgcgtttacccggtttcattttcagttgaggccaaaatccccgcgggttggtcggggcggggcggggctcgggggacggggctgaccgcggggccggggccagggtctcacatcatccagaggatgtatggctgcgacctggggcccgacgggcgcttcctccgcgggcataaccagtacgcctacgacggcaaggattacatcgccctgaacgaggacctgagctcctggaccgcggcggacaccgcggctcagatcacccagcgcaagtgggaggcggcccgtgtggcggagcagctgagagcctacctggagggcctgtgcgtggagtggctccgcagatacctggagaacgggaaggagacgctgcagcgcgcgggtaccaggggcagtggggagccttccccatctcctataggtcgccggggatggcctcccacgagaagaggaggaaaatgggatcagcgctagaatgtcgccctcccttgaatggagaatggcatgagttttcctgagtttcctctgagggccccctcttctctctaggacaattaagggatgacgtctctgaggaaatggaggggaagacagtccctagaatactgatcaggggtcccctttgacccctgcagcagccttgggaaccgtgacttttcctctcaggccttgttctctgcctcacactcagtgtgtttggggctctgattccagcacttctgagtcactttacctccactcagatcaggagcagaagtccctgttccccgctcagagactcgaactttccaatgaataggagattatcccaggtgcctgcgtccaggctggtgtctgggttctgtgccccttccccacaccaggtgtcctgtccattctcaggctggtcacatgggtggtcctagggtgtcccatgagagatgcaaagcgcctgaattttctgactcttcccatcagaccccccaaagacacacgtgacccaccaccccgtctctgaccatgaggccaccctgaggtgctgggccctgggcttctaccctgcggagatcacactgacctggcagcgggatggcgaggaccaaactcaggacactgagcttgtggagaccagaccagcaggagatagaaccttccagaagtgggcagctgtggtggtgccttctggagaagagcagagatacacatgccatgtacagcatgaggggctgccgaagcccctcaccctgagatggggtaaggagggggatgaggggtcatatctcttctcagggaaagcaggagcccttctggagcccttcagcagggtcagggcccctcgtcttcccctcctttcccagagccatcttcccagtccaccatccccatcgtgggcattgttgctggcctggctgtcctagcagttgtggtcatcggagctgtggtcgctactgtgatgtgtaggaggaagagctcaggtagggaaggggtgaggggtggggtctgggttttcttgtcccactgggggtttcaagccccaggtagaagtgttccctgcctcattactgggaagcagcatccacacaggggctaacgcagcctgggaccctgtgtgccagcacttactcttttgtgcagcacatgtgacaatgaaggacggatgtatcaccttgatggttgtggtgttggggtcctgatttcagcattcatgagtcaggggaaggtccctgctaaggacagaccttaggagggcagttggtccaggacccacacttgctttcctcgtgtttcctgatcctgccttgggtctgtagtcatacttctggaaattccttttgggtccaagacgaggaggttcctctaagatcttaaggccctgcttcctcccagtcccctcacaggacattttcttcccacaggtggaaaaggagggagctactctcaggctgcgtgtaagtggtgggggtgggagtgtggaggagctcacccaccccataattcctcctgtcccacgtctcctgcgggctctgaccaggtcctgtttttgttctactccagccagcgacagtgcccagggctctgatgtgtctctcacagcttgaaaaggtgagattcttggggtctagagtgggcggggggggcggggagggggcagaggggaaaggcctgggtaatggagattctttgattgggatgtttcgcgtgtgtcgtgggctgttcagagtgtcatcacttaccatgactaaccagaatttgttcatgactgttgttttctgtagcctgagacagctgtcttgtgagggactgagatgcaggatttcttcactcctcccctttgtgacttcaagagcctctggcatctctttctgcaaacggcacctgaatgtgtctgcgtccctgttagcctaatgtgaggaggtggagagacagcccacccccgtgtccactgtgacccctgttcccatgctgacctgtgtttcctccccagtcatctttcttgttccagagaggtggggctggatgtctccatctctgtctcaactttatgtgcactgagctgcaacttcttacttccctactgaaaataagaatctgaatataaacttgttttctcaaatatttgctatgagaggttgatggattaattaaataagtcaattcctggaatttgagagagcaaataaagacctgaga

SEQ ID NO: 752 - DNA, 1089 bp, Homo sapiens
atgcgggtcacggcaccccgaaccctcctcctgctgctctggggggccctggccctgaccgagacctgggccggctcccactccatgaggtatttctacaccgccatgtcccggcccggccgcggggagccccgcttcatcgcagtgggctacgtggacgacacgcagttcgtgaggttcgacagcgacgccgcgagtccgagagaggagccgcgggcgccgtggatagagcaggaggggccggagtattgggaccggaacacacagatctacaaggcccaggcacagactgaccgagagagcctgcggaacctgcgcggctactacaaccagagcgaggccgggtctcacaccctccagaggatgtacggctgcgacctggggccggacgggcgcctcctccgcgggcataaccagttagcctacgacggcaaggattacatcgccctgaacgaggacctgagctcctggaccgcggcggacaccgcggctcagatcacccagcgcaagtgggaggcggcccgtgtggcggagcagctgagagcctacctggagggcctgtgcgtggagtggctccgcagatacctggagaacgggaaggagacgctgcagcgcgcggaccccccaaagacacacgtgacccaccaccccatctctgaccatgaggccaccctgaggtgctgggccctgggcttctaccctgcggagatcacactgacctggcagcgggatggcgaggaccaaactcaggacactgagcttgtggagaccagaccagcaggagatagaaccttccagaagtgggcagctgtggtggtgccttctggagaagagcagagatacacatgccatgtacagcatgaggggctgccgaagcccctcaccctgagatgggagccatcttcccagtccaccatccccatcgtgggcattgttgctggcctggctgtcctagcagttgtggtcatcggagctgtggtcgctactgtgatgtgtaggaggaagagctcaggtggaaaaggagggagctactctcaggctgcgtccagcgacagtgcccagggctctgatgtgtctctcacagcttga

SEQ ID NO: 753 - DNA, 1089 bp, Homo sapiens
atgcgggtcacggcgccccgaaccgtcctcctgctgctctggggggcagtggccctgaccgagacctgggccggctcccactccatgaggtatttctacaccgccatgtcccggcccggccgcggggagccccgcttcatcgcagtgggctacgtggacgacacccagttcgtgaggttcgacagcgacgccgcgagtccgaggacggagccccgggcgccatggatagagcaggaggggccggagtattgggaccggaacacacagatcttcaagaccaacacacagacttaccgagagagcctgcggaacctgcgcggctactacaaccagagcgaggccgggtctcacatcatccagaggatgtatggctgcgacctggggcccgacgggcgcctcctccgcgggcatgaccagttcgcctacgacggcaaggattacatcgccctgaacgaggacctgagctcctggaccgcggcggacaccgcggctcagatcacccagcgcaagtgggaggcggcccgtgtggcggagcagctgagagcctacctggagggcctgtgcgtggagtggctccgcagatacctggagaacgggaaggagacgctgcagcgcgcggaccccccaaagacacacgtgacccaccaccccgtctctgaccatgaggccaccctgaggtgctgggccctgggcttctaccctgcggagatcacactgacctggcagcgggatggcgaggaccaaactcaggacactgagcttgtggagaccagaccagcaggagatagaaccttccagaagtgggcagctgtggtggtgccttctggagaagagcagagatacacatgccatgtacagcatgaggggctgccgaagcccctcaccctgagatgggagccatcttcccagtccaccatccccatcgtgggcattgttgctggcctggctgtcctagcagttgtggtcatcggagctgtggtcgctactgtgatgtgtaggaggaagagctcaggtggaaaaggagggagctactctcaggctgcgtccagcgacagtgcccagggctctgatgtgtctctcacagcttga

SEQ ID NO: 754 - DNA, 1101 bp, Homo sapiens
atgcgggtcatggcgccccgaaccctcatcctgctgctctcgggagccctggccctgaccgagacctgggccggctcccactccatgaggtatttctacaccgctgtgtcccggcccggccgcggggagccccacttcatcgcagtgggctacgtggacgacacgcagttcgtgcggttcgacagcgacgccgcgagtccgagaggggagccgcgggcgccgtgggtggagcaggaggggccggagtattgggaccgggagacacagaagtacaagcgccaggcacagactgaccgagtgagcctgcggaacctgcgcggctactacaaccagagcgaggccgggtctcacatcctccagaggatgtatggctgcgacgtggggcccgacgggcgcctcctccgcgggtatgaccagtccgcctacgacggcaaggattacatcgccctgaacgaggatctgcgctcctggaccgccgcggacacggcggctcagatcacccagcgcaagtgggaggcggcccgtgaggcggagcagctgagagcctacctggagggcctgtgcgtggagtggctccgcagatacctgaagaatgggaaggagacgctgcagcgcgcggaacacccaaagacacacgtgacccaccatcccgtctctgaccatgaggccaccctgaggtgctgggccctgggcttctaccctgcggagatcacactgacctggcagtgggatggggaggaccaaactcaggacactgagcttgtggagaccaggccagcaggagatggaaccttccagaagtgggcagctgtggtggtgccttctggagaagagcagagatacacgtgccatgtgcagcacgaggggctgccggagcccctcaccctgagatgggagccatcttcccagcccaccatccccatcgtgggcatcgttgctggcctggctgtcctggctgtcctagctgtcctaggagctgtggtggctgttgtgatgtgtaggaggaagagctcaggtggaaaaggagggagctgctctcaggctgcgtccagcaacagtgcccagggctctgatgagtctctcatcgcttgtaaagcctga

SEQ ID NO: 755 - DNA, 1093 bp, Homo sapiens
atgcgggtcacggcgccccgaaccgtcctcctgctgctctggggggcagtggccctgaccgagacctgggccggctcccactccatgaggtatttctacaccgccatgtcccggcccggccgcggggagccccgcttcatcgcagtgggctacgtggacgacacccagttcgtgaggttcgacagcgacgccgcgagtccgaggacggagccccgggcgccatggatagagcaggaggggccggagtattgggacggggagacacggaacatgaaggcctccgcgcagacttaccgagagaacctgcggatcgcgctccgctactacaaccagagcgaggccgggtctcacatcatccagaggatgtatggctgcgacctggggcccgacgggcgcctcctccgcgggcatgaccagtccgcctacgacggcaaggattacatcgccctgaacgaggacctgagctcctggaccgcggcggacaccgcggctcagatcacccagcgcaagtgggaggcggcccgtgtggcggagcagctgagagcctacctggagggcctgtgcgtggagtggctccgcagatacctggagaacgggaaggagacgctgcagcgcgcggaccccccaaagacacacgtgacccaccaccccgtctctgaccatgaggccaccctgaggtgctgggccctgggcttctaccctgcggagatcacactgacctggcagcgggatggcgaggaccaaactcaggacactgagcttgtggagaccagaccagcaggagatagaaccttccagaagtgggcagctgtggtggtgccttctggagaagagcagagatacacatgccatgtacagcatgaggggctgccgaagcccctcaccctgagatgggagccatcttcccagtccaccatccccatcgtgggcattgttgctggcctggctgtcctagcagttgtggtcatcggagctgtggtcgctactgtgatgtgtaggaggaagagctcaggtggaaaaggagggagctactctcaggctgcgtccagcgacagtgcccagggctctgatgtgtctctcacagcttgaaaag

SEQ ID NO: 756 - DNA, 1089 bp, Homo sapiens
atgcgggtcacggcgccccgaaccgtcctcctgctgctctggggggcagtggccctgaccgagacctgggccggctcccactccatgaggtatttctacaccgccatgtcccggcccggccgcggggagccccgcttcattgcagtgggctacgtggacgacacccagttcgtgaggttcgacagcgacgccgcgagtccgaggacggagccccgggcgccatggatagagcaggaggggccggagtattgggaccggaacacacagatcttcaagaccaacacacagactgaccgagagagcctgcggaacctgcgcggctactacaaccagagcgaggccgggtctcacacttggcagacgatgtatggctgcgacgtggggccggacgggcgcctcctccgcgggcataaccagtacgcctacgacggcaaagattacatcgccctgaacgaggacctgagctcctggaccgcggcggacaccgcggctcagatcacccagcgcaagtgggaggcggcccgtgaggcggagcagctgagagcctacctggagggcctgtgcgtggagtggctccgcagacacctggagaacgggaaggagacgctgcagcgcgcggaccccccaaagacacacgtgacccaccaccccgtctctgaccatgaggccaccctgaggtgctgggccctgggcttctaccctgcggagatcacactgacctggcagcgggatggcgaggaccaaactcaggacactgagcttgtggagaccagaccagcaggagatagaaccttccagaagtgggcagctgtggtggtgccttctggagaagagcagagatacacatgccatgtacagcatgaggggctgccgaagcccctcaccctgagatgggagccatcttcccagtccaccatccccatcgtgggcattgttgctggcctggctgtcctagcagttgtggtcatcggagctgtggtcgctactgtgatgtgtaggaggaagagctcaggtggaaaaggagggagctactctcaggctgcgtccagcgacagtgcccagggctctgatgtgtctctcacagcttga

SEQ ID NO: 757 - DNA, 1089 bp, Homo sapiens
atgcgggtcacggcgccccgaaccgtcctcctgctgctctcgggagccctggccctgaccgagacctgggccggctcccactccatgaggtatttctacaccgccatgtcccggcccggccgcggggagccccgcttcatcgcagtgggctacgtggacgacacccagttcgtgaggttcgacagcgacgccgcgagtccgaggatggcgccccgggcgccatggatagagcaggaggggccggagtattgggaccggaacacacagatctccaagaccaacacacagacttaccgagagagcctgcggaacctgcgcggctactacaaccagagcgaggccgggtctcacatcatccagaggatgtatggctgcgacgtggggccggacgggcgcctcctccgcgggtatgaccagtccgcctacgacggcaaggattacatcgccctgaacgaggacctgagctcctggaccgcggcggacacggcggctcagatcacccagcgcaagtgggaggcggcccgtgaggcggagcagctgagagcctacctggagggcctgtgcgtggagtggctccgcagatacctggagaacgggaaggagacgctgcagcgcgcggaccccccaaagacacatgtgacccaccaccccatctctgaccatgaggccaccctgaggtgctgggccctgggcttctaccctgcggagatcacactgacctggcagcgggatggcgaggaccaaactcaggacaccgagcttgtggagaccagaccagcaggagatagaaccttccagaagtgggcagctgtggtggtgccttctggagaagagcagagatacacatgccatgtacagcatgaggggctgccgaagcccctcaccctgagatgggagccatcttcccagtccaccatccccatcgtgggcattgttgctggcctggctgtcctagcagttgtggtcatcggagctgtggtcgctactgtgatgtgtaggaggaagagctcaggtggaaaaggagggagctactctcaggctgcgtccagcgacagtgcccagggctctgatgtgtctctcacagcttga

SEQ ID NO: 758 - DNA, 1098 bp, Homo sapiens
atgcgggtcacggcgccccgaaccgtcctcctgctgctctggggggcagtggccctgaccgagacctgggccggctcccactccatgaggtatttctacaccgccatgtcccggcccggccgcggggagccccgcttcatcgcagtgggctacgtggacgacacccagttcgtgaggttcgacagcgacgccgcgagtccgaggacggagccccgggcgccatggatagagcaggaggggccggagtattgggaccggaacacacagatcttcaagaccaacacacagacttaccgagagagcctgcggaacctgcgcggctactacaaccagagcgaggccgggtctcacatcatccagaggatgtatggctgcgacctggggcccgacgggcgcctcctccgcgggcataaccagttcgcctacgacggcaaggattacatcgccctgaacgaggacctgagctcctggaccgcggcggacaccgcggctcagatcacccagcgcaagtgggaggcggcccgtgtggcggagcagctgagagcctacctggagggcctgtgcgtggagtggctccgcagatacctggagaacgggaaggagacgctgcagcgcgcggaccccccaaagacacacgtgacccaccaccccgtctctgaccatgaggccaccctgaggtgctgggccctgggcttctaccctgcggagatcacactgacctggcagcgggatggcgaggaccaaactcaggacactgagcttgtggagaccagaccagcaggagatagaaccttccagaagtgggcagctgtggtggtgccttctggagaagagcagagatacacatgccatgtacagcatgaggggctgccgaagcccctcaccctgagatgggagccatcttcccagtccaccatccccatcgtgggcattgttgctggcctggctgtcctagcagttgtggtcatcggagctgtggtcgctactgtgatgtgtaggaggaagagctcaggtggaaaaggagggagctactctcaggctgcgtccagcgacagtgcccagggctctgatgtgtctctcacagcttgaaagcctgag

SEQ ID NO: 759 - DNA, 1101 bp, Homo sapiens
atgcgggtcatggcgccccgaaccctcatcctgctgctctcgggagccctggccctgaccgagacctgggccggctcccactccatgaggtatttctacaccgctgtgtcccggcccggccgcggggagccccacttcatcgcagtgggctacgtggacgacacgcagttcgtgcggttcgacagcgacgccgcgagtccgagaggggagccgcgggcgccgtgggtggagcaggaggggccggagtattgggaccgggagacacagaagtacaagcgccaggcacagactgaccgagtgagcctgcggaacctgcgcggctactacaaccagagcgaggccgggtctcacatcatccagaggatgtatggctgcgacgtggggcccgacgggcgcctcctccgcgggtatgaccagtacgcctacgacggcaaggattacatcgccctgaacgaggatctgcgctcctggaccgccgcggacacggcggctcagatcacccagcgcaagtgggaggcggcccgtgaggcggagcagctgagagcctacctggagggcctgtgcgtggagtggctccgcagatacctgaagaatgggaaggagacgctgcagcgcgcggaacacccaaagacacacgtgacccaccatcccgtctctgaccatgaggccaccctgaggtgctgggccctgggcttctaccctgcggagatcacactgacctggcagtgggatggggaggaccaaactcaggacactgagcttgtggagaccaggccagcaggagatggaaccttccagaagtgggcagctgtggtggtgccttctggagaagagcagagatacacgtgccatgtgcagcacgaggggctgccggagcccctcaccctgagatgggagccgtcttcccagcccaccatccccatcgtgggcatcgttgctggcctggctgtcctggctgtcctagctgtcctaggagctgtggtggctgttgtgatgtgtaggaggaagagctcaggtggaaaaggagggagctgctctcaggctgcgtccagcaacagtgcccagggctctgatgagtctctcatcgcttgtaaagcctga

SEQ ID NO: 760 - DNA, 1089 bp, Homo sapiens
atgcgggtcacggcgccccgaaccgtcctcctgctgctctggggggcagtggccctgaccgagacctgggccggctcccactccatgaggtatttctacaccgccatgtcccggcccggccgcggggagccccgcttcatcgcagtgggctacgtggacgacacccagttcgtgaggttcgacagcgacgccgcgagtccgaggacggagccccgggcgccatggatagagcaggaggggccggagtattgggaccggaacacacagatcttcaagaccaacacacagacttaccgagagaacctgcggatcgcgctccgctactacaaccagagcgaggccgggtctcacatcatccagaggatgtatggctgcgacctggggcccgacgggcgcctcctccgcgggcatgaccagtccgcctacgacggcaaggattacatcgccctgaacgaggacctgagctcctggaccgcggcggacaccgcggctcagatcacccagcgcaagtgggaggcggcccgtgtggcggagcagctgagagcctacctggagggcctgtgcgtggagtggctccgcagatacctggagaacgggaaggagacgctgcagcgcgcggaccccccaaagacacacgtgacccaccaccccgtctctgaccatgaggccaccctgaggtgctgggccctgggcttctaccctgcggagatcacactgacctggcagcgggatggcgaggaccaaactcaggacactgagcttgtggagaccagaccagcaggagatagaaccttccagaagtgggcagctgtggtggtgccttctggagaagagcagagatacacatgccatgtacagcatgaggggctgccgaagcccctcaccctgagatgggagccatcttcccagtccaccatccccatcgtgggcattgttgctggcctggctgtcctagcagttgtggtcatcggagctgtggtcgctactgtgatgtgtaggaggaagagctcaggtggaaaaggagggagctactctcaggctgcgtccagcgacagtgcccagggctctgatgtgtctctcacagcttga

SEQ ID NO: 761 - DNA, 1089 bp, Homo sapiens
atgcgggtcacggcgccccgaaccgtcctcctgctgctctcgggagccctggccctgaccgagacctgggccggctcccactccatgaggtatttctacaccgccatgtcccggcccggccgcggggagccccgcttcatcgcagtgggctacgtggacgacacccagttcgtgaggttcgacagcgacgccgcgagtccgaggatggcgccccgggcgccatggatagagcaggaggggccggagtattgggaccgggagacacagatctccaagaccaacacacagacttaccgagagagcctgcggaacctgcgcggctactacaaccagagcgaggccgggtctcacaccctccagaggatgtacggctgcgacgtggggccggacgggcgcctcctccgcgggcatgaccagtccgcctacgacggcaaggattacatcgccctgaacgaggacctgagctcctggaccgcggcggacacggcggctcagatcacccagcgcaagtgggaggcggcccgtgaggcggagcagtggagagcctacctggagggcctgtgcgtggagtggctccgcagatacctggagaacgggaaggagacgctgcagcgcgcggaccccccaaagacacatgtgacccaccaccccatctctgaccatgaggccaccctgaggtgctgggccctgggcttctaccctgcggagatcacactgacctggcagcgggatggcgaggaccaaactcaggacaccgagcttgtggagaccagaccagcaggagatagaaccttccagaagtgggcagctgtggtggtgccttctggagaagagcagagatacacatgccatgtacagcatgaggggctgccgaagcccctcaccctgagatgggagccatcttcccagtccaccatccccatcgtgggcattgttgctggcctggctgtcctagcagttgtggtcatcggagctgtggtcgctactgtgatgtgtaggaggaagagctcaggtggaaaaggagggagctactctcaggctgcgtccagcgacagtgcccagggctctgatgtgtctctcacagcttga

SEQ ID NO: 762 - DNA, 1089 bp, Homo sapiens
atgcgggtcacggcgccccgaaccgtcctcctgctgctctcgggagccctggccctgaccgagacctgggccggctcccactccatgaggtatttctacaccgccatgtcccggcccggccgcggggagccccgcttcatcgcagtgggctacgtggacgacacccagttcgtgaggttcgacagcgacgccgcgagtccgaggatggcgccccgggcgccatggatagagcaggaggggccggagtattgggaccgggagacacagatctccaagaccaacacacagacttaccgagagagcctgcggaacctgcgcggctactacaaccagagcgaggccgggtctcacacttggcagacgatgtatggctgcgacgtggggccggacgggcgcctcctccgcgggcatgaccagtccgcctacgacggcaaggattacatcgccctgaacgaggacctgagctcctggaccgcggcggacacggcggctcagatcacccagcgcaagtgggaggcggcccgtgaggcggagcagtggagagcctacctggagggcctgtgcgtggagtggctccgcagatacctggagaacgggaaggagacgctgcagcgcgcggaccccccaaagacacatgtgacccaccaccccatctctgaccatgaggccaccctgaggtgctgggccctgggcttctaccctgcggagatcacactgacctggcagcgggatggcgaggaccaaactcaggacaccgagcttgtggagaccagaccagcaggagatagaaccttccagaagtgggcagctgtggtggtgccttctggagaagagcagagatacacatgccatgtacagcatgaggggctgccgaagcccctcaccctgagatgggagccatcttcccagtccaccatccccatcgtgggcattgttgctggcctggctgtcctagcagttgtggtcatcggagctgtggtcgctactgtgatgtgtaggaggaagagctcaggtggaaaaggagggagctactctcaggctgcgtccagcgacagtgcccagggctctgatgtgtctctcacagcttga

SEQ ID NO: 763 - DNA, 1089 bp, Homo sapiens
atgcgggtcacggcgccccgaaccgtcctcctgctgctctggggggcagtggccctgaccgagacctgggccggctcccactccatgaggtatttctacaccgccatgtcccggcccgtccgcggggagccccgcttcatcgcagtgggctacgtggacgacacccagttcgtgaggttcgacagcgacgccgcgagtccgaggacggagccccgggcgccatggatagagcaggaggggccggagtattgggaccggaacacacagatcttcaagaccaacacacagacttaccgagagagcctgcggaacctgcgcggctactacaaccagagcgaggccgggtctcacatcatccagaggatgtatggctgcgacctggggcccgacgggcgcctcctccgcgggcatgaccagtccgcctacgacggcaaggattacatcgccctgaacgaggacctgagctcctggaccgcggcggacaccgcggctcagatcacccagcgcaagtgggaggcggcccgtgtggcggagcagctgagagcctacctggagggcctgtgcgtggagtggctccgcagatacctggagaacgggaaggagacgctgcagcgcgcggaccccccaaagacacacgtgacccaccaccccgtctctgaccatgaggccaccctgaggtgctgggccctgggcttctaccctgcggagatcacactgacctggcagcgggatggcgaggaccaaactcaggacactgagcttgtggagaccagaccagcaggagatagaaccttccagaagtgggcagctgtggtggtgccttctggagaagagcagagatacacatgccatgtacagcatgaggggctgccgaagcccctcaccctgagatgggagccatcttcccagtccaccatccccatcgtgggcattgttgctggcctggctgtcctagcagttgtggtcatcggagctgtggtcgctactgtgatgtgtaggaggaagagctcaggtggaaaaggagggagctactctcaggctgcgtccagcgacagtgcccagggctctgatgtgtctctcacagcttga

SEQ ID NO: 764 - DNA, 1098 bp, Homo sapiens
atgcgggtcacggcgccccgaaccgtcctcctgctgctctggggggcagtggccctgaccgagacctgggccggctcccactccatgaggtatttctacaccgccatgtcccggcccggccgcggggagccccgcttcatcgcagtgggctacgtggacgacacccagttcgtgaggttcgacagcgacgccgcgagtccgaggacggagccccgggcgccatggatagagcaggaggggccggagtattgggaccggaacacacagatcttcaagaccaacacacagacttaccgagagagcctgcggaacctgcgcggctactacaaccagagcgaggccgggtctcacaccctccagagcatgtacggctgcgacctggggcccgacgggcgcctcctccgcgggcatgaccagtccgcctacgacggcaaggattacatcgccctgaacgaggacctgagctcctggaccgcggcggacaccgcggctcagatcacccagcgcaagtgggaggcggcccgtgtggcggagcagctgagagcctacctggagggcctgtgcgtggagtggctccgcagatacctggagaacgggaaggagacgctgcagcgcgcggaccccccaaagacacacgtgacccaccaccccgtctctgaccatgaggccaccctgaggtgctgggccctgggcttctaccctgcggagatcacactgacctggcagcgggatggcgaggaccaaactcaggacactgagcttgtggagaccagaccagcaggagatagaaccttccagaagtgggcagctgtggtggtgccttctggagaagagcagagatacacatgccatgtacagcatgaggggctgccgaagcccctcaccctgagatgggagccatcttcccagtccaccatccccatcgtgggcattgttgctggcctggctgtcctagcagttgtggtcatcggagctgtggtcgctactgtgatgtgtaggaggaagagctcaggtggaaaaggagggagctactctcaggctgcgtccagcgacagtgcccagggctctgatgtgtctctcacagcttgaaagcctgag

SEQ ID NO: 765 - DNA, 1583 bp, Homo sapiens
atgcaaatagatgggaaaatttattctataataagttttccagttagagattctgtttcaacattgggtgtgatagggattttaatatgctttgatgagtcgttagatattattgaaaatcagttgtattcttctcttaaatttggtagtaaaaattataatttttttatgcttgacagaaattacatgcccattttttcaaaccttaataatcttcaggccaaatctttttctacagcttatagtgagaattttttgagtaaagttatagcttatgctaaaaaagattcttctagctctcagtacacttttaattatgaaagagatttttattctttaaactttgtaaaaaccgatgattttttgactcaggggcttattttaaatgtcaattccattcctattatgtttaaatcaaattgggttatatttgttgcatttttattattgtcttttgcaattattttttatttatgcaatacttttgttttttcattaattaatgattttaacagaattgttgactatcaaaaatcaaaaagcgatccttttagtcttgaatctcccttagaggttaagtattcttcatctattatttcttatattagttcaaagctagataatctgtcttctaagagtaatgaatcttttgagaagataaaattttattctgaagatttgaatgaatatttggaacaaatagaaactgctatatcaaatactgagagtatagattctagcattttagtttacgaacaactaagagatactttttctagatttgaaaaatcaattgttgatattttaaaaggctttgaatctattgctgatccgattaatgatcacaataaatatatatcagaaatctcttcaaattttgaagagagtgttagttttttctatagtatagatatttaaatattgtttttgaaaatgtgaataaaaattttgcagatcttttgtctcaaacaaatagtttgcaaagtgtaaataaacttttagtttcaatttcagctcagaccaatatgcttgctatgaatgcagcaattgaagcagcaaaagcaggtgatgcaggtaaaagttttgcagttgttgctgaggagattagaaagcttgctattaattctggaaaatattctaaaaccattaaagatgaacttaaaacggtcgacagcattattgcagtaattaattcagagattgatacaatttataaaaatttcatagacattcaagataatgtggacaacaatttttcaagacacgagaaagtagatcttactcttgctaagcattttaaagaaattggcgagtttaaagaaaggtatttgtctcacgatactaagatcagagatgctaagaatatgtataaagaaatatttaataatcattattttattagtggcaagtttaacaactttagtcaagatttaaaagagtttaaagtttctaagatgaatttagatgcggtaagttctcttcaagaatattcatctttagtaaagtcttctaaggataagatattaaagacaaaggaattgattcaaaagattaatgatgagattaaagatattcttttttag

SEQ ID NO: 766 - DNA, 1089 bp, Homo sapiens
atgcgggtcacggcaccccgaaccgtcctcctgctgctctcggcggccctggccctgaccgagacctgggccggctcccactccatgaggtatttccacaccgccatgtcccggcccggccgcggggagccccgcttcatcaccgtgggctacgtggacgacacgctgttcgtgaggttcgacagcgacgccacgagtccgaggaaggagccgcgggcgccatggatagagcaggaggggccggagtattgggaccgggagacacagatctccaagaccaacacacagacttaccgagagaacctgcggatcgcgctccgctactacaaccagagcgaggccgggtctcacacttggcagaggatgtatggctgcgacctggggcccgacgggcgcctcctccgcgggtataaccagttagcctacgacggcaaggattacatcgccctgaacgaggacctgagctcctggaccgcggcggacaccgcggctcagatcacccagcgcaagtgggaggcggcccgtgaggcggagcagctgagagcctacctggagggcctgtgcgtggagtggctccgcagatacctggagaacgggaaggagacgctgcagcgcgcggaccccccaaagacacatgtgacccaccaccccatctctgaccatgaggccaccctgaggtgctgggccctgggcttctaccctgcggagatcacactgacctggcagcgggatggcgaggaccaaactcaggacaccgagcttgtggagaccagaccagcaggagatagaaccttccagaagtgggcagctgtggtggtgccttctggagaagagcagagatacacatgccatgtacagcatgaggggctgccgaagcccctcaccctgagatgggagccatcttcccagtccaccatccccatcgtgggcattgttgctggcctggctgtcctagcagttgtggtcatcggagctgtggtcgctactgtgatgtgtaggaggaagagctcaggtggaaaaggagggagctactctcaggctgcgtccagcgacagtgcccagggctctgatgtgtctctcacagcttga

SEQ ID NO: 767 - DNA, 1433 bp, Homo sapiens
tgtgtgtctgtgtctgtctgtgtctcgcagcggcgcgcggccccggacaagcgctggggattcccgtttgaggcgtcactactgtcactgccatcaccccacggagccacttctagaggggagtagacccggcccttcgccgggcagagaagatgttgcccctgtccatcaaagacgatgaatacaaaccacccaagttcaatttgttcggcaagatctcgggctggtttaggtctatactgtccgacaagacttcccggaacctgtttttcttcctgtgcctgaacctctctttcgcttttgtggaactactctacggcatctggagcaactgcttaggcttgatttccgactcttttcacatgtttttcgatagcactgccattttggctggactggcagcttctgttatttcaaaatggagagataatgatgctttctcctatgggtatgttagagcggaagttctggctggctttgtcaatggcctatttttgatcttcactgctttttttattttctcagaaggagttgagagagcattagcccctccagatgtccaccatgagagactgcttcttgtttccattcttgggtttgtggtaaacctaataggaatatttgttttcaaacatggaggtcatggacattctcatggctctggccacggacacagtcattccctctttaatggtgctctagatcaggcacatggccatgtcgatcattgccatagccatgaagtgaaacatggtgctgcacatagccatgatcatgctcatggacatggacactttcattctcatgatggcccgtccttaaaagaaacaacaggacccagcagacagattttacaaggtgtatttttacatatcctagcagatacacttggaagtattggtgtaattgcttctgccatcatgatgcaaaattttggtctgatgatagcagatcctatctgttcaattcttatagccattcttatagttgtaagtgttattcctcttttaagagaatctgttggaatattaatgcagagaactcctcccctattagaaaatagtctgcctcagtgctatcagagggtacagcagttgcaaggagtttacagtttacaggaacagcacttctggactttatgttctgacgtttatgttgggaccttgaaattaatagtagcacctgatgctgatgctaggtggattttaagccaaacacataatatttttactcaggctggagtgagacagctctacgtacagattgactttgcagccatgtagtgaatggaaagaaattatgcaccttttatggaccaaatttttctgccagtaagaatttcagttgtgggcctccagtcttctggaatgtcttcactgcagctgctggaaatcactgctttcattcccacaaaaccagtattactttttttt

SEQ ID NO: 768 - DNA, 1748 bp, Homo sapiens
tgtgtgtctgtgtctgtctgtgtctcgcagcggcgcgcggccccggacaagcgctggggattcccgtttgaggcgtcactactgtcactgccatcaccccacggagccacttctagaggggagtagacccggcccttcgccgggcagagaagatgttgcccctgtccatcaaagacgatgaatacaaaccacccaagttcaatttgttcggcaagatctcgggctggtttaggtctatactgtccgacaagacttcccggaacctgtttttcttcctgtgcctgaacctctctttcgcttttgtggaactactctacggcatctggagcaactgcttaggcttgatttccgactcttttcacatgtttttcgatagcactgccattttggctggactggcagcttctgttatttcaaaatggagagataatgatgctttctcctatgggtatgttagagcggaagttctggctggctttgtcaatggcctatttttgatcttcactgctttttttattttctcagaaggagttgagagagcattagcccctccagatgtccaccatgagagactgcttcttgtttccattcttgggtttgtggtaaacctaataggaatatttgttttcaaacatggaggtcatggacattctcatggctctggccacggacacagtcattccctctttaatggtgctctagatcaggcacatggccatgtcgatcattgccatagccatgaagtgaaacatggtgctgcacatagccatgatcatgctcatggacatggacactttcattctcatgatggcccgtccttaaaagaaacaacaggacccagcagacagattttacaaggtgtatttttacatatcctagcagatacacttggaagtattggtgtaattgcttctgccatcatgatgcaaaattttggtctgatgatagcagatcctatctgttcaattcttatagccattcttatagttgtaagtgttattcctcttttaagagaatctgttggaatattaatgcagagaactcctcccctattagaaaatagtctgcctcagtgctatcagagggtacagcagttgcaaggagtttacagtttacaggaacagcacttctggactttatgttctgacgtttatgttgggaccttgaaattaatagtagcacctgatgctgatgctaggtggattttaagccaaacacataatatttttactcaggctggagtgagacagctctacgtacagattgactttgcagccatgtagtgaatggaaagaaattatgcaccttttatggaccaaatttttctggtactgtacgatccaaaacattgtacccagctttttaaaagagagaaattatcactacaactcccgagcactaagtagacggggtagagtcagccgttcatgctttgtggggagttcacagctaagggatcagatttaagaggatatctcctggacttttggtcttttcttttgtgctctttcctccaaatctttttgacttctgaggtttttagcttaggatgttaatttgtccttttgtctttctttttttgtttttgttttctgtttgtttgttttcatgttgaatgcccacaccaccatcctctcatcccagccagtaagaatttcagttgtgggcctccagtcttctggaatgtcttcactgcagctgctggaaatcactgctttcattcccacaaaaccagtattacttttttt

SEQ ID NO: 769 - DNA, 4826 bp, Homo sapiens
ggcggcggcggcggcggcggcggcggggattgtttttgttgtcgctgaggccggaagagccggagccgggtccctgtccccgggccgggcgccgccgccgccccctgcccagcgcccgcgtctccgcggcgccaccccagcgccaatattccggagatcaagcgttacgcggcggcggcggcggcggcggcggggcccggagcgggaggcgccggggaccggggcgaggcggcccccgccgccgccatggaggcgctgggacccggacctccggctagcctgtttcagccacctcgtcgtcctggccttggaactgttggaaaaccaattcgactgttagccaatcattttcaggttcagattcctaaaatagatgtgtatcactatgatgtggatattaagcctgaaaaacggcctcgtagagtcaacagggaggtagtagatacaatggtgcggcacttcaagatgcaaatatttggtgatcggcagcctgggtatgatggcaaaagaaacatgtacacagcacatccactaccaattggacgggatagggttgatatggaggtgactcttccaggcgagggtaaagaccaaacatttaaagtgtctgttcagtgggtgtcagttgtgagccttcagttgcttttagaagctttggctgggcacttgaatgaagtcccagatgactcagtacaagcacttgatgttatcacaagacaccttccctccatgaggttagtaccttggtttggattatttcctacaaatgtcagacttttttggtacaccccagtgggccgttcctttttctcacccccggaaggttactaccaccctctgggagggggcagggaggtctggtttggttttcatcagtctgtgagacctgccatgtggaatatgatgctcaacattgatgtatctgcaactgctttctaccgggctcagcctatcattgagttcatgtgtgaggttttagacattcagaacatcaatgaacagaccaaacctctaacagactcccagcgtgtcaaatttaccaaagaaatcagaggtctcaaagttgaggtgacccactgtggacagatgaaacgaaaataccgagtttgtaatgtgactagacggccagccaacattctctcctatagttttcctttgcagctagaaaacggtcaagctatggaatgtacagtagctcaatattttaagcaaaagtatagtctgcaactgaaatacccccatcttccctgtctccaagtgggacaagaacaaaagcatacatacttgccactcgaggtctgtaatatagtggcaggacagcgatgtatcaagaagctcacagacaatcagacttccacaatgatcaaagctacagcaagatctgctcctgacagacaggaagagatcagtagactggtgaagagcaacagtatggtgggtggacctgatccataccttaaagaatttggtattgttgtccacaatgaaatgacagagctcacaggcagggtacttccagcaccaatgctgcaatatggaggccggaataaaacagtagccacacccaaccagggtgtctgggacatgcgaggaaagcagttttatgctggcattgaaattaaagtttgggcagttgcttgttttgcacctcagaaacaatgtagggaagatttactaaagagtttcactgaccagctgcgtaaaatctctaaggatgcaggaatgcccatccagggtcagccatgtttctgcaagtatgcacaaggtgcagacagtgtggagcctatgtttaaacatctgaaaatgacttatgtgggcctacagctaatagtggttatcctgcctggaaagacaccagtatatgcggaggtgaaacgtgttggagatacccttctaggtatggccacacagtgtgtccaggtaaaaaatgtagtgaagacctcacctcaaaccctttccaatctttgcctgaagataaatgcaaaacttggaggaattaacaatgtgcttgtgcctcatcaaaggccctcggtgttccagcagcctgtcatcttcctgggagcggatgtcacacaccccccagcaggggatgggaagaaaccttccattgctgctgtggttggcagtatggatggccaccccagccggtactgtgccaccgttcgggtgcagacttcccggcaggagatctcccaagagctcctctacagtcaagaggtcatccaggacctgactaacatggttcgagagctgctgattcagttctacaaatccacacgcttcaaacccactcggatcatctattaccgtggaggggtatctgagggacaaatgaaacaggtagcttggccagaactaatagcaattcgaaaggcatgtattagcttggaagaagattaccggccaggaataacttatattgtggtgcaaaaaagacatcacacacgactcttctgtgcagataaaacagaaagggtagggaaaagtggcaatgtaccagcaggcactacagtggatagtaccatcacacatccatctgagtttgacttttacctctgtagtcatgcaggaattcagggaaccagccgtccctcacattaccaggtcttgtgggatgacaactgcttcactgcagatgaactccagctactgacttaccagctgtgtcacacctatgtgaggtgcactcgctccgtctctattccagcccctgcatattatgcccggcttgtagcatttagggcaaggtatcatctggtggataaagatcatgacagtgcggaaggcagtcatgtgtcaggacagagcaacggccgggatcctcaggccttggctaaggctgtgcaaatccaccatgatacccagcacacgatgtattttgcctgagagtctcagaaaaagaactcaaccaatttggcaccccatgcagcctcaaaatgtttcaaatgcctaccgcctctagatcgagccacgttgacttcaggtggtcttctaccagcagctcggaatagttgcactgaatctatactttgcagcactgtctgatgcgtcaacaaaattgagccatttttttaaagtaatagatactaatagattatcttttctgatgcactggactgaatttttacctcaatgtgcaaaggctgatcagcctgaactttctaaaggactttacaagaagggtttctatggaatattttgctagctgtggtgttcaccgcatccctctagtcttagaagagaagattattccttttttctgtagtcattgagtggggtatatgcataagtgggagagaaaaaccaaacaatctacttcagttcagtgtaactatttaattgtgtgggtccatagactttttaatgaagatttctgactttgccactgtaaatgcctttaatgagcattaatttttgaaagttttacagagttttattagttttactactttatcttattgatctctgcagacttgtgctggtgcaagtacatgctgacaggcaatttgcactatatttggctgcagattcaaataggcagttctcttatttggtcgacttttgtgaatgtgtgacataaacagatgtaatgcatgtcacagtgacggagataacactgccatgataaaagtactcatgtttcccctatttggaaaaaaaaattgcttttagtatttttccaagttttcaaaagtgcccattttatgctgctgtgtggtttgttaaatctaaatgatttttaaacttttctcatagaaacttaactttggcaataaacattttttaaggtctctcctcttccttccccaacaatgtagttttctagatgagatttcagtatgattttatcagctatttcttatatatcataatctggcaatttctgaaaccagtcagaaaagacatatatttccatgcctttttaaagaattatttttacctgttttatattcacagttggtgtcctgtcactttgttttaaaataagctagaaccaggatgcttccttattggaaaggctttgccagtccttaaggtacaatgagtgatgctgcaacttgcaaatgtaccagcatttaaaatttcttttcctgggaatcaaggtaactcacacgactacttgcagtacaaattttttgcttctctttcgacatgaaatgtacttggtgggttttccttccttttattaaactaaaactgtgtggaaaaggttgatttttcttaatagattctggattccactcacagggagatgggattcctttcttgtccaaacaaagggagttgctctaaagcgagcatcagttaaaatgtaggggaaaatgtattctgtatgtagtgtagataatactttgtgaatggacaacagttacatagtgtcttggtagcaccagccagtgtttcccagcccagagtttactgacttgtaattctctatccaggacatcaggagtgagggatggaaaaggggataaaaggcctggagccacactctatatggctgaggaaggagctagggaaagagatagacacaatggggtgaaaacaattttgccgcccctgcctggaaactgctggtggggaaatgatggtgaagggtgtttgcttgaactcatgagacggtccaaatctcataaactagccttctcaaaatcccagcaatataaagcactgtttttcttcagtcgtttaaataaacttgtaaatacattgaagtttacatttccatgtgctgttgatcaacggcgccacctgtgtttgctgagactggtctctgagagagttttatgtcgatcgaggcctgttgctcattaagctgagtgcag

SEQ ID NO: 770 - DNA, 3016 bp, Homo sapiens
ggcggcggcggcggcggcggcggcggggattgtttttgttgtcgctgaggccggaagagccggagccgggtccctgtccccgggccgggcgccgccgccgccccctgcccagcgcccgcgtctccgcggcgccaccccagcgccaatattccggagatcaagcgttacgcggcggcggcggcggcggcggcggggcccggagcgggaggcgccggggaccggggcgaggcggcccccgccgccgccatggaggcgctgggacccggacctccggctagcctgtttcagccacctcgtcgtcctggccttggaactgttggaaaaccaattcgactgttagccaatcattttcaggttcagattcctaaaatagatgtgtatcactatgatgtggatattaagcctgaaaaacggcctcgtagagtcaacagggaggtagtagatacaatggtgcggcacttcaagatgcaaatatttggtgatcggcagcctgggtatgatggcaaaagaaacatgtacacagcacatccactaccaattggacgggatagggttgatatggaggtgactcttccaggcgagggtaaagaccaaacatttaaagtgtctgttcagtgggtgtcagttgtgagccttcagttgcttttagaagctttggctgggcacttgaatgaagtcccagatgactcagtacaagcacttgatgttatcacaagacaccttccctccatgaggtacaccccagtgggccgttcctttttctcacccccggaaggttactaccaccctctgggagggggcagggaggtctggtttggttttcatcagtctgtgagacctgccatgtggaatatgatgctcaacattgatgtatctgcaactgctttctaccgggctcagcctatcattgagttcatgtgtgaggttttagacattcagaacatcaatgaacagaccaaacctctaacagactcccagcgtgtcaaatttaccaaagaaatcagaggtctcaaagttgaggtgacccactgtggacagatgaaacgaaaataccgagtttgtaatgtgactagacggccagccagtcatcaaacttttcctttgcagctagaaaacggtcaagctatggaatgtacagtagctcaatattttaagcaaaagtatagtctgcaactgaaatacccccatcttccctgtctccaagtgggacaagaacaaaagcatacatacttgccactcgaggtctgtaatatagtggcaggacagcgatgtatcaagaagctcacagacaatcagacttccacaatgatcaaagctacagcaagatctgctcctgacagacaggaagagatcagtagactggtgaagagcaacagtatggtgggtggacctgatccataccttaaagaatttggtattgttgtccacaatgaaatgacagagctcacaggcagggtacttccagcaccaatgctgcaatatggaggccggaataaaacagtagccacacccaaccagggtgtctgggacatgcgaggaaagcagttttatgctggcattgaaattaaagtttgggcagttgcttgttttgcacctcagaaacaatgtagggaagatttactaaagagtttcactgaccagctgcgtaaaatctctaaggatgcaggaatgcccatccagggtcagccatgtttctgcaagtatgcacaaggtgcagacagtgtggagcctatgtttaaacatctgaaaatgacttatgtgggcctacagctaatagtggttatcctgcctggaaagacaccagtatatgcggaggtgaaacgtgttggagatacccttctaggtatggccacacagtgtgtccaggtaaaaaatgtagtgaagacctcacctcaaaccctttccaatctttgcctgaagataaatgcaaaacttggaggaattaacaatgtgcttgtgcctcatcaaaggccctcggtgttccagcagcctgtcatcttcctgggagcggatgtcacacaccccccagcaggggatgggaagaaaccttccattgctgctgtggttggcagtatggatggccaccccagccggtactgtgccaccgttcgggtgcagacttcccggcaggagatctcccaagagctcctctacagtcaagaggtcatccaggacctgactaacatggttcgagagctgctgattcagttctacaaatccacacgcttcaaacccactcggatcatctattaccgtggaggggtatctgagggacaaatgaaacaggtagcttggccagaactaatagcaattcgaaaggcatgtattagcttggaagaagattaccggccaggaataacttatattgtggtgcaaaaaagacatcacacacgactcttctgtgcagataaaacagaaagggtagggaaaagtggcaatgtaccagcaggcactacagtggatagtaccatcacacatccatctgagtttgacttttacctctgtagtcatgcaggaattcagggaaccagccgtccctcacattaccaggtcttgtgggatgacaactgcttcactgcagatgaactccagctactgacttaccagctgtgtcacacctatgtgaggtgcactcgctccgtctctattccagcccctgcatattatgcccggcttgtagcatttagggcaaggtatcatctggtggataaagatcatgacagtgcggaaggcagtcatgtgtcaggacagagcaacggccgggatcctcaggccttggctaaggctgtgcaaatccaccatgatacccagcacacgatgtattttgcctgagagtctcagaaaaagaactcaaccaatttggcaccccatgcagcctcaaaatgtttcaaatgcctaccgcctctagatcgagccacgttgacttcagttggtgtcctgtcactttgttttaaaataagctagaaccaggatgcttccttattggaaaggctttgccagtccttaaggtacaatg

SEQ ID NO: 771 - DNA, 3050 bp, Homo sapiens
tgagtgcccgtcgcgtcgcgccgcgtcgccccccgggccgcctccttgccgccagtggcgggctccgttctccctcgaagcactccccccagctccatgaatggaaatcggctccgcaggacccgctggggcccagcccctactcatggtgcccagaagacctggctatggcgccatgggcaaacccattaaactgctggctaactgttttcaagttgaaatcccaaagattgatgtctacctctatgaggtagatattaaaccagacaagtgtcctaggagagtgaacagggaggtggttgactcaatggttcagcattttaaagtaactatatttggagaccgtagaccagtttatgatggaaaaagaagtctttacaccgccaatccacttcctgtggcaactacaggggtagatttagacgttactttacctggggaaggtggaaaagatcgacctttcaaggtgtcaatcaaatttgtctctcgggtgagttggcacctactgcatgaagtactgacaggacggactttgcctgagccactggaattagacaagccaatcagcactaaccctgtccatgccgttgatgtggtgctacgacatctgccctccatgaaatacacacctgtggggcgttcatttttctccgctccagaaggatatgaccaccctctgggagggggcagggaagtgtggtttggattccatcagtctgttcggcctgccatgtggaaaatgatgcttaatatcgatgtttctgccactgccttctacaaagcacaacctgtaattcagttcatgtgtgaagttcttgatattcataatattgatgagcaaccaagacctctgactgattctcatcgggtaaaattcaccaaagagataaaaggtttgaaggttgaagtgactcattgtggaacaatgagacggaaataccgtgtttgtaatgtaacaaggaggcctgccagtcatcaaacctttcctttacagttagaaaacggccaaactgtggagagaacagtagcgcagtatttcagagaaaagtatactcttcagctgaagtacccgcaccttccctgtctgcaagtcgggcaggaacagaaacacacctacctgccactagaagtctgtaatattgtggcagggcaacgatgtatcaagaagctaacagacaatcagacttccactatgatcaaggcaacagcaagatctgcaccagatagacaagaggaaattagcagattggtaagaagtgcaaattatgaaacagatccatttgttcaggagtttcaatttaaagttcgggatgaaatggctcatgtaactggacgcgtacttccagcacctatgctccagtatggaggacggaatcggacagtagcaacaccgagccatggagtatgggacatgcgagggaaacaattccacacaggagttgaaatcaaaatgtgggctatcgcttgttttgccacacagaggcagtgcagagaagaaatattgaagggtttcacagaccagctgcgtaagatttctaaggatgcagggatgcccatccagggccagccatgcttctgcaaatatgcacagggggcagacagcgtagagcccatgttccggcatctcaagaacacatattctggcctacagcttattatcgtcatcctgccggggaagacaccagtgtatgcggaagtgaaacgtgtaggagacacacttttgggtatggctacacaatgtgttcaagtcaagaatgtaataaaaacatctcctcaaactctgtcaaacttgtgcctaaagataaatgttaaactcggagggatcaataatattcttgtacctcatcaaagaccttctgtgttccagcaaccagtgatctttttgggagccgatgtcactcatccacctgctggtgatggaaagaagccttctattgctgctgttgtaggtagtatggatgcacacccaagcagatactgtgccacagtaagagttcagagaccccgacaggagatcatccaggacttggcctccatggtccgggaacttcttattcaattttataagtcaactcggttcaagcctactcgtatcatcttttatcgggatggtgtttcagaggggcagtttaggcaggtattatattatgaactactagcaattcgagaagcctgcatcagtttggagaaagactatcaacctggaataacctacattgtagttcagaagagacatcacactcgattattttgtgctgataggacagaaagggttggaagaagtggcaatatcccagctggaacaacagttgatacagacattacacacccatatgagttcgatttttacctctgtagccatgctggaatacagggtaccagtcgtccttcacactatcatgttttatgggatgataactgctttactgcagatgaacttcagctgctaacttaccagctctgccacacttacgtacgctgtacacgatctgtttctatacctgcaccagcgtattatgctcacctggtagcatttagagccagatatcatcttgtggacaaagaacatgacagtgctgaaggaagtcacgtttcaggacaaagcaatgggcgagatccacaagctcttgccaaggctgtacagattcaccaagataccttacgcacaatgtacttcgcttaaatagtccaagtatattctctgagaggaagtactgaaagatgaattgacatacaacgtatgtttccagtgaagtcaattgagtaaggacacctccagccatacagaaaccaacactgtgtgggggccaaggtctgatccttatgttaacacaaggaagattgtttacttcatcaaggaacacagcatcattatgcaatatgaaaccagccaactgctttttgtgcggtctcctataggaagtatcgcaattgtcttgttttcatttcttgtagtctaacccttttaatgcctttacctcaagttgcttggcagcacaactatctttgcaaaaaaaagtaaagaaaaagtaaatgatggtttaaaaaat

SEQ ID NO: 772 - DNA, 4776 bp, Homo sapiens
ggcggcggcggcggcggcggcggcggggattgtttttgttgtcgctgaggccggaagagccggagccgggtccctgtccccgggccgggcgccgccgccgccccctgcccagcgcccgcgtctccgcggcgccaccccagcgccaatattccggagatcaagcgttacgcggcggcggcggcggcggcggcggggcccggagcgggaggcgccggggaccggggcgaggcggcccccgccgccgccatggaggcgctgggacccggacctccggctagcctgtttcagccacctcgtcgtcctggccttggaactgttggaaaaccaattcgactgttagccaatcattttcaggttcagattcctaaaatagatgtgtatcactatgatgtggatattaagcctgaaaaacggcctcgtagagtcaacagggaggtagtagatacaatggtgcggcacttcaagatgcaaatatttggtgatcggcagcctgggtatgatggcaaaagaaacatgtacacagcacatccactaccaattggacgggatagggttgatatggaggtgactcttccaggcgagggtaaagaccaaacatttaaagtgtctgttcagtgggtgtcagttgtgagccttcagttgcttttagaagctttggctgggcacttgaatgaagtcccagatgactcagtacaagcacttgatgttatcacaagacaccttccctccatgaggtacaccccagtgggccgttcctttttctcacccccggaaggttactaccaccctctgggagggggcagggaggtctggtttggttttcatcagtctgtgagacctgccatgtggaatatgatgctcaacattgatgtatctgcaactgctttctaccgggctcagcctatcattgagttcatgtgtgaggttttagacattcagaacatcaatgaacagaccaaacctctaacagactcccagcgtgtcaaatttaccaaagaaatcagaggtctcaaagttgaggtgacccactgtggacagatgaaacgaaaataccgagtttgtaatgtgactagacggccagccagtcatcaaacttttcctttgcagctagaaaacggtcaagctatggaatgtacagtagctcaatattttaagcaaaagtatagtctgcaactgaaatacccccatcttccctgtctccaagtgggacaagaacaaaagcatacatacttgccactcgaggtctgtaatatagtggcaggacagcgatgtatcaagaagctcacagacaatcagacttccacaatgatcaaagctacagcaagatctgctcctgacagacaggaagagatcagtagactggtgaagagcaacagtatggtgggtggacctgatccataccttaaagaatttggtattgttgtccacaatgaaatgacagagctcacaggcagggtacttccagcaccaatgctgcaatatggaggccggaataaaacagtagccacacccaaccagggtgtctgggacatgcgaggaaagcagttttatgctggcattgaaattaaagtttgggcagttgcttgttttgcacctcagaaacaatgtagggaagatttactaaagagtttcactgaccagctgcgtaaaatctctaaggatgcaggaatgcccatccagggtcagccatgtttctgcaagtatgcacaaggtgcagacagtgtggagcctatgtttaaacatctgaaaatgacttatgtgggcctacagctaatagtggttatcctgcctggaaagacaccagtatatgcggaggtgaaacgtgttggagatacccttctaggtatggccacacagtgtgtccaggtaaaaaatgtagtgaagacctcacctcaaaccctttccaatctttgcctgaagataaatgcaaaacttggaggaattaacaatgtgcttgtgcctcatcaaaggccctcggtgttccagcagcctgtcatcttcctgggagcggatgtcacacaccccccagcaggggatgggaagaaaccttccattgctgctgtggttggcagtatggatggccaccccagccggtactgtgccaccgttcgggtgcagacttcccggcaggagatctcccaagagctcctctacagtcaagaggtcatccaggacctgactaacatggttcgagagctgctgattcagttctacaaatccacacgcttcaaacccactcggatcatctattaccgtggaggggtatctgagggacaaatgaaacaggtagcttggccagaactaatagcaattcgaaaggcatgtattagcttggaagaagattaccggccaggaataacttatattgtggtgcaaaaaagacatcacacacgactcttctgtgcagataaaacagaaagggtagggaaaagtggcaatgtaccagcaggcactacagtggatagtaccatcacacatccatctgagtttgacttttacctctgtagtcatgcaggaattcagggaaccagccgtccctcacattaccaggtcttgtgggatgacaactgcttcactgcagatgaactccagctactgacttaccagctgtgtcacacctatgtgaggtgcactcgctccgtctctattccagcccctgcatattatgcccggcttgtagcatttagggcaaggtatcatctggtggataaagatcatgacaggcaatgcggaaggcagtcatgtgtcaggacagagcaacggccgggatcctcaggccttggctaaggctgtgcaaatccaccatgatacccagcacacgatgtattttgcctgagagtctcagaaaaagaactcaaccaatttggcaccccatgcagcctcaaaatgtttcaaatgcctaccgcctctagatcgagccacgttgacttcaggtggtcttctaccagcagctcggaatagttgcactgaatctatactttgcagcactgtctgatgcgtcaacaaaattgagccatttttttaaagtaatagatactaatagattatcttttctgatgcactggactgaatttttacctcaatgtgcaaaggctgatcagcctgaactttctaaaggactttacaagaagggtttctatggaatattttgctagctgtggtgttcaccgcatccctctagtcttagaagagaagattattccttttttctgtagtcattgagtggggtatatgcataagtgggagagaaaaaccaaacaatctacttcagttcagtgtaactatttaattgtgtgggtccatagactttttaatgaagatttctgactttgccactgtaaatgcctttaatgagcattaatttttgaaagttttacagagttttattagttttactactttatcttattgatctctgcagacttgtgctggtgcaagtacatgctgacaggcaatttgcactatatttggctgcagattcaaataggcagttctcttatttggtcgacttttgtgaatgtgtgacataaacagatgtaatgcatgtcacagtgacggagataacactgccatgataaaagtactcatgtttcccctatttggaaaaaaaaattgcttttagtatttttccaagttttcaaaagtgcccattttatgctgctgtgtggtttgttaaatctaaatgatttttaaacttttctcatagaaacttaactttggcaataaacattttttaaggtctctcctcttccttccccaacaatgtagttttctagatgagatttcagtatgattttatcagctatttcttatatatcataatctggcaatttctgaaaccagtcagaaaagacatatatttccatgcctttttaaagaattatttttacctgttttatattcacagttggtgtcctgtcactttgttttaaaataagctagaaccaggatgcttccttattggaaaggctttgccagtccttaaggtacaatgagtgatgctgcaacttgcaaatgtaccagcatttaaaatttcttttcctgggaatcaaggtaactcacacgactacttgcagtacaaattttttgcttctctttcgacatgaaatgtacttggtgggttttccttccttttattaaactaaaactgtgtggaaaaggttgatttttcttaatagattctggattccactcacagggagatgggattcctttcttgtccaaacaaagggagttgctctaaagcgagcatcagttaaaatgtaggggaaaatgtattctgtatgtagtgtagataatactttgtgaatggacaacagttacatagtgtcttggtagcaccagccagtgtttcccagcccagagtttactgacttgtaattctctatccaggacatcaggagtgagggatggaaaaggggataaaaggcctggagccacactctatatggctgaggaaggagctagggaaagagatagacacaatggggtgaaaacaattttgccgcccctgcctggaaactgctggtggggaaatgatggtgaagggtgtttgcttgaactcatgagacggtccaaatctcataaactagccttctcaaaatcccagcaatataaagcactgtttttcttcagtcgtttaaataaacttgtaaatacattgaagtttacatttccatgtgctgttgatcaacggcgccacctgtgtttgctgagactggtctctgagagagttttatgtcgatcgaggcctgttgctcattaagctgagtgcag

SEQ ID NO: 773 - DNA, 7478 bp, Homo sapiens
actggcagctggccgggcgctcgcagtgggagctgctgcaggctccgcggcggcggcaacggaggctgcgggggcggcggcgcgagcggccgggcttggtaggggagccgagcccggcccgggatcccgagcagcgagagtgtggggtacctaggcccctcacgctggacttcacagtctccgggccgcctgacctccgcacgggtatatgggatggaagcgggaccctcgggagcagctgcgggcgcttacctgccccccctgcagcaggtgttccaggcacctcgccggcctggcattggcactgtggggaaaccaatcaagctcctggccaattactttgaggtggacatccctaagatcgacgtgtaccactacgaggtggacatcaagccggataagtgtccccgtagagtcaaccgggaagtggtggaatacatggtccagcatttcaagcctcagatctttggtgatcgcaagcctgtgtatgatggaaagaagaacatttacactgtcacagcactgcccattggcaacgaacgggtcgactttgaggtgacaatccctggggaagggaaggatcgaatctttaaggtctccatcaagtggctagccattgtgagctggcgaatgctgcatgaggccctggtcagcggccagatccctgttcccttggagtctgtgcaagccctggatgtggccatgaggcacctggcatccatgaggtacacccctgtgggccgctccttcttctcaccgcctgagggctactaccacccgctggggggtgggcgcgaggtctggttcggctttcaccagtctgtgcgccctgccatgtggaagatgatgctcaacattgatgtctcagccactgccttttataaggcacagccagtgattgagttcatgtgtgaggtgctggacatcaggaacatagatgagcagcccaagcccctcacggactctcagcgcgttcgcttcaccaaggagatcaagggcctgaaggtggaagtcacccactgtggacagatgaagaggaagtaccgcgtgtgtaatgttacccgtcgccctgctagccatcagacattccccttacagctggagagtggacagactgtggagtgcacagtggcacagtatttcaagcagaaatataaccttcagctcaagtatccccatctgccctgcctacaagttggccaggaacaaaagcatacctaccttcccctagaggtctgtaacattgtggctgggcagcgctgtattaaaaagctgaccgacaaccagacctcgaccatgataaaggccacagctagatccgctccagacagacaggaggagatcagtcgcctgatgaagaatgccagctacaacttagatccctacatccaggaatttgggatcaaagtgaaggatgacatgacggaggtgacagggcgagtgctgccggcgcccatcttgcagtacggcggccggaaccgggccattgccacacccaatcagggtgtctgggacatgcgggggaaacagttctacaatgggattgagatcaaagtctgggccatcgcctgcttcgcaccccaaaaacagtgtcgagaagaggtgctcaagaacttcacagaccagctgcggaagatttccaaggatgcggggatgcctatccagggtcaaccttgtttctgcaaatatgcacagggggcagacagcgtggagcctatgttccggcatctcaagaacacctactcagggctgcagctcattattgtcatcctgccagggaagacgccggtgtatgctgaggtgaaacgtgtcggagatacactcttgggaatggctacgcagtgtgtgcaggtgaagaacgtggtcaagacctcacctcagactctgtccaacctctgcctcaagatcaatgtcaaacttggtggcattaacaacatcctagtcccacaccagcgctctgccgtttttcaacagccagtgatattcctgggagcagatgttacacaccccccagcaggggatgggaaaaaaccttctatcacagcagtggtaggcagtatggatgcccaccccagccgatactgtgctactgtgcgggtacagcgaccacggcaagagatcattgaagacttgtcctacatggtgcgtgagctcctcatccaattctacaagtccacccgtttcaagcctacccgcatcatcttctaccgagatggggtgcctgaaggccagctaccccagatactccactatgagctactggccattcgtgatgcctgcatcaaactggaaaaggactaccagcctgggatcacttatattgtggtgcagaaacgccatcacacccgccttttctgtgctgacaagaatgagcgaattgggaagagtggtaacatcccagctgggaccacagtggacaccaacatcacccacccatttgagtttgacttctatctgtgcagccacgcaggcatccagggcaccagccgaccatcccattactatgttctttgggatgacaaccgtttcacagcagatgagctccagatcctgacgtaccagctgtgccacacttacgtacgatgcacacgctctgtctctatcccagcacctgcctactatgcccgcctggtggctttccgggcacgataccacctggtggacaaggagcatgacagtggagaggggagccacatatcggggcagagcaatgggcgggacccccaggccctggccaaagccgtgcaggttcaccaggatactctgcgcaccatgtacttcgcttgaaggcagaacgctgttacctcactggatagaagaaagctttccaagccccaggagctgtgccacccaaatccagaggaagcaaggaggagggaggtggggtagggaggagtgtaggatgccttgtttccttctatagaggtggtgtaagagtggggaacagggccagcaagacagaccaccagccagaaatctctgatatcaacctcatgtcccccacccctcaccccatcttgtcacatctggccctgaccccactggaccaaaaggggcagcactggtgcccaccatacacacaggtgtctcatgtgactcacagtgctaaagactcatgcttgacagcttggtaaggtcaactctgtagccctgcagacaaaagctggttaggtttgggtttgatactttagatgggaaagtgaggggcttgagaaagtgggtgggaggagggaaggattttttaggagccttaatcagaaaaggactagatttgtttaagaagaaaaatgaaaccagacccagatcaatattttaggatactagatgttttaatgggttcagaatccagtttgtaggaagattttttaatggttttggttgctcctcccccagctgccaccccccaccttacccttattcctctctgtccacattttctgccccaccttacttctcctccctgacagacatccagcccctagtaatacttaaggcactatggcacttagctttgaagtgacacgaccctgtcttccttccgcccgctggtgggtaaccagtgccttccctgtaacggtaatgctgcagaactgcaaccttttgtacctttctttggggaatggggtgggggtgggagaggaggtagatggggaagaaataccccagacccaacaaacctccagccagaaagccagctattttgcatttgaaggaattgacttcctcattcattgagctttttaaaagatcacaacctcaagatggttaaaatccattgacatttgcactttcaaacatgacaagtctcggagctgctgagatgacaggcccctggcctttccacttatgcctccttttctccttattcctcctacctcccgccccgcccaggtctggagttactttcatagcatttttcactcttggcttcttttctcccttgatggtcaagtctcttatgtttcaatatttcttaactggggtgtcttataacaaaaaactcttaggtctaaaatgagaaaaaagagagaaaacaaaatgttatttttataccataacttgagtgtattgccaaaatttggaaatccttcccatgcctgatgagtttatatcccagaaacattgagccatcagaatgaactgtgtacctgatttgttctctgacctggctaggtagggagggggtggttatcgccccaagatggggtccaggctccatccttcctctgtgcagataatacctttttcttgctatagcctccctcctctgcactgtcctgcactctttcttgcaagtgcatctttttccttcccctggactgtcctctgaccctttggctcatcctagattgcagtgtgtcctgtggacaggctggggaattttgctgctccctattgcttctgtttacaaaaatgaatttttcctggtttcccactagggcatgtgggtgggtggcatggacttttttttttttttttttttgtcttgagacatggggtttggctgtcttgcaggactggagaaggtggtggttctagcttggtctctgttggccttgaagcaagcatcccccctgccctttttccttgactgttcatttttttcctgccccactgcttgggatggggagttgcaacttcagtgtggaatttcctctttgaggagcctgggcttggatctatcctgatctggtgatgaagccatgattactttagacctagcccaggcttggaggccagctggaggaagaagggtctaaatcctggcctgtagagttagaactaccatttcctccccttagctgcccttgtatgacccggatttgctatgcaaaacaatctatcccaggttctgttctggttggctacattgttcagcaactcacaaaacgtagcacaaacattcattatggagaaagcatcaggactgttgagtaactcctcctttacttttttcctgctggctacagcatggggtgccctataggcacaagcccagctgaagaacagaatggagggctctgggaggaggcagctcactggagagcctacattccttacacaagtgcctaaagagagtgatgctaacactccatctgccctgtccattgccttcatatacagtctacttcgtgttctgtcaccctttggggaggggagttctcctgggacagtgggctctgcatgttctccacttggatacattttggggctaggatcagggcactattcctggagggtccagtcattcaccagcatttgcaaatgtccatagggagcaggtggcagcctctactcccagcaacaagtttgtgttctctccttttctctctttgcctcactctctccagttggttttcagctggggcttgaaatgcatttttagccctttgacgtggcttatgccattcaagaaataaaaagcaagagaatcagctttgggcaatgacaagaaatgagttcttactctgatttttttgtaaaaagataatttttgagacttgaaaaataccccgaccttgagattattcctgtttgaaaggtggtgcatgcagatggagaagtggtgttggcagcaagctttggctcatgtggatttggtttaagtggtgcttcttacccaagcttcaaggaagtgcttgggggacccccagcctcatcctcttagttgggtctcttgttccctttgtaccactgttttgccttccttttcctcttctctctttgcctggcttcctttcccttttcttctattcactctgcttgcttgctggccggcctgcctgcctgcctgcctgcctgcctgcctgtctgcctatgtgatgatgaaatctctgcatggctgcaatgatcccactgttagctggcagggtcaggcttagctccttgactgcagaagaccaagaacctgttccccaagcccagagatgtccacctgggctggactgccctcaagcttatactagagaagagcaactgacctgcccaacttgtgtgaagtcaggagggtttctggcattttccacacctgtccactccttggagctggtttctctcattgctttttctaaatctggttctttttctctttacctggggcctggcttttctgagattgtcttagggttgagctatttgggtatcctgggtttgagtgttaggggatggacataaaggaaaaagagtgatgagaagagaatggagagaatttgaataaaaggtgggaaaggagagcactgttctttgattgtttatccagtccaacctgatccattagggatcgaggtgctacactggcctccagggataagcctggggctactgttgctgggaacttaggcttaacataaagccgaagaaggtacctagaaatttgaaacttccctaaaaagctcctaatgcccacctgctagatagcttctctgtggcctcctatttagctaagcagcagtgtttttggatactttttttttctgtttgtgaataaggccagcactcaagatgggcagccaagggtgcactgactattagctggcccataggatatctgtaaggctggtgggacagttttggacctggaatcatgtgtaactaacaaggttggacgtttcttccccatcagggtagaaaaatcatctcaaactagccaaaaggcagttttggaaactacattgggggacgttatttttatttatatatggggcctaggccaatccaggatggtagctggaataccttccttcttaaaatctgatcatggcagggatatgcagggcactttttactatttggccttctaagcagattgggaaggaggtattttctggttttcgctttcctccgacttaataggacttgccttctccctgggcagggagagaggctgggttggtgctctcccttactctactcatactgacttagagcctctggctgctgtttgggcatccaagaaagggaggggaaggaatgagctaaaaacaaaacagaatgaggtgggaaagggagattttcttctttacagaggaaaataggaaaccctccaagaattgtgcaagtaaagacatttgttgaatgcactgagtcccttggtgtagtagcaataaggaaaaatgaaattactttcctgtgcacacagtccagcctaattggtatgtgatgttgcacttagcagccatgtggtgggcatgtgtgactactctggttttcactttagtttctaaactttttatccctctcaagtccagcatggatggggaaatgtctctggatccccacagctgtgtacttgtttgcatttgtttccctttgagatttgtgtttgtgtcctgctttgagctgtaccttgtccagtccattgtgaaattatcccagcagctgtaatgtacagttccttctgaagcaagcaacatcagcagcagcagcagcagcagcacaattctgtgttttataaagacaacagtggcttctatttctaa

SEQ ID NO: 774 - DNA, 4185 bp, Homo sapiens
ggcgcgagtagtcctgcccctccgcgttgtctccggccggcacggcccggcggggtacggccgagcccgccgcatgtggcccggctcccggacacctccccggcgtcctccgcgccggccgctcctgccccgacgtcgctccggcacggctcggggcccagaggcgaggcgaggacgccgggcaagccaggcagcggaactgacgccggcgagcttccggggcggccccgggcaggtcggcggcggcggcccgcagtcgtggaggagcggtgggagcgtcggcggccgcgggcgatgcaacttccggacgggactcccctctgtccgcgcctcacatctccccttcctctcgcctagtcctgtgccgttttccgtccgcgactcttccggcccagagctttcggagtgcggttgctcaggggaagccgtcgccgcccccgcctcggggccgagtgagagtgcccgtcgcgtcgcgccgcgtcgccccccgggccgcctccttgccgccagtggcgggctccgttctccctcgaagcactccccccagctccatgaatggaaatcggctccgcaggacccgctggggcccagcccctactcatggtgcccagaagacctggctatggcaccatgggcaaacccattaaactgctggctaactgttttcaagttgaaatcccaaagattgatgtctacctctatgaggtagatattaaaccagacaagtgtcctaggagagtgaacagggaggtggttgactcaatggttcagcattttaaagtaactatatttggagaccgtagaccagtttatgatggaaaaagaagtctttacaccgccaatccacttcctgtggcaactacaggggtagatttagacgttactttacctggggaaggtggaaaagatcgacctttcaaggtgtcaatcaaatttgtctctcgggtgagttggcacctactgcatgaagtactgacaggacggaccttgcctgagccactggaattagacaagccaatcagcactaaccctgtccatgccgttgatgtggtgctacgacatctgccctccatgaaatacacacctgtggggcgttcatttttctccgctccagaaggatatgaccaccctctgggagggggcagggaagtgtggtttggattccatcagtctgttcggcctgccatgtggaaaatgatgcttaatatcgatgtttctgccactgccttctacaaagcacaacctgtaattcagttcatgtgtgaagttcttgatattcataatattgatgagcaaccaagacctctgactgattctcatcgggtaaaattcaccaaagagataaaaggtttgaaggttgaagtgactcattgtggaacaatgagacggaaataccgtgtttgtaatgtaacaaggaggcctgccagtcatcaaacctttcctttacagttagaaaacggccaaactgtggagagaacagtagcgcagtatttcagagaaaagtatactcttcagctgaagtacccgcaccttccctgtctgcaagtcgggcaggaacagaaacacacctacctgccactagaagtctgtaatattgtggcagggcaacgatgtatcaagaagctaacagacaatcagacttccactatgatcaaggcaacagcaagatctgcaccagatagacaagaggaaattagcagattggtaagaagtgcaaattatgaaacagatccatttgttcaggagtttcaatttaaagttcgggatgaaatggctcatgtaactggacgcgtacttccagcacctatgctccagtatggaggacggaatcggacagtagcaacaccgagccatggagtatgggacatgcgagggaaacaattccacacaggagttgaaatcaaaatgtgggctatcgcttgttttgccacacagaggcagtgcagagaagaaatattgaagggtttcacagaccagctgcgtaagatttctaaggatgcagggatgcccatccagggccagccatgcttctgcaaatatgcacagggggcagacagcgtagagcccatgttccggcatctcaagaacacatattctggcctacagcttattatcgtcatcctgccggggaagacaccagtgtatgcggaagtgaaacgtgtaggagacacacttttgggtatggctacacaatgtgttcaagtcaagaatgtaataaaaacatctcctcaaactctgtcaaacttgtgcctaaagataaatgttaaactcggagggatcaataatattcttgtacctcatcaaagaccttctgtgttccagcaaccagtgatctttttgggagccgatgtcactcatccacctgctggtgatggaaagaagccttctattgctgctgttgtaggtagtatggatgcacacccaagcagatactgtgccacagtaagagttcagagaccccgacaggagatcatccaggacttggcctccatggtccgggaacttcttattcaattttataagtcaactcggttcaagcctactcgtatcatcttttatcgggatggtgtttcagaggggcagtttaggcaggtattatattatgaactactagcaattcgagaagcctgcatcagtttggagaaagactatcaacctggaataacctacattgtagttcagaagagacatcacactcgattattttgtgctgataggacagaaagggttggaagaagtggcaatatcccagctggaacaacagttgatacagacattacacacccatatgagttcgatttttacctctgtagccatgctggaatacagggtaccagtcgtccttcacactatcatgttttatgggatgataactgctttactgcagatgaacttcagctgctaacttaccagctctgccacacttacgtacgctgtacacgatctgtttctatacctgcaccagcgtattatgctcacctggtagcatttagagccagatatcatcttgtggacaaagaacatgacagtgctgaaggaagtcacgtttcaggacaaagcaatgggcgagatccacaagctcttgccaaggctgtacagattcaccaagataccttacgcacaatgtacttcgcttaaatagtccaagtatattctctgagaggaagtactgaaagatgaattgacatacaacgtatgtttccagtgaagtcaattgagtaaggacacctccagccatacagaaaccaacactgtgtgggggccaaggtctgatccttatgttaatacaaggaagattgtttacttcatcaaggaacacagcatcattatgcaatatgaaaccagccaactgctttttgtgcggtctcctataggaagtatcgcaattgttttgttttcatttcttgtagtctaacccttttaatgcctttacctcaagttgcttggcagcacaactatctttgcaaaaaaaagtaaagaaaaagtaaatgatggtttaaaaaatacacaccttcatgaataatcaaagtgatttttcagaattatgtgtgcaaaaaattaatgtgcattcatatattcttgtaaaaggtgtctgtgtatttttaaaatatatacatccatacttcatatgcatatatatctagatctggattgataatagatatatatgtgtctgttatatattttagagttcattccattggggaattttctttcccttttattctacccccactaccgcctttatttctctatttcccttgccttcatcacctacatttttttcccagtcctaccagtgacattcaaatgttgatgtatctggttcgtttgaatataaaatatggcaaactagaattctacttttattttgcataccctactcctgactcctatctcatacacaattctgagttctcaactcttgatattgctgtcttaagaaacaaaattttatatatatatgtatacatacatacacagacacagacacacacatatatatacataaaataactttctgtgagagtgcgtctctcccctcccactcagaacatacatttaccatttgcgcaatttgtatataagcagtagcaacctgaactattctttttcttttttctttttcttttctttcttttttttttttaatgagacagagcctcgctctgtcaccaggctgga

SEQ ID NO: 775 - DNA, 7478 bp, Homo sapiens; identical to SEQ ID NO: 773

SEQ ID NO: 776 - DNA, 4473 bp, Homo sapiens
acgccggcgagcttccggggcggccccgggcaggtcggcggcggcggcccgcagtcgtggaggagcggtgggagcgtcggcggccgcgggcgatgcaacttccggacgggactcccctctgtccgcgcctcacatctccccttcctctcgcctagtcctgtgccgttttccgtccgcgactcttccggcccagagctttcggagtgcggttgctcaggggaagccgtcgccgcccccgcctcggggccgagtgagagtgcccgtcgcgtcgcgccgcgtcgccccccgggccgcctccttgccgccagtggcgggctccgttctccctcgaagcactccccccagctccatgaatggaaatcggctccgcaggacccgctggggcccagcccctactcatggtgcccagaagacctggctatggcaccatgggcaaacccattaaactgctggctaactgttttcaagttgaaatcccaaagattgatgtctacctctatgaggtagatattaaaccagacaagtgtcctaggagagtgaacagggaggtggttgactcaatggttcagcattttaaagtaactatatttggagaccgtagaccagtttatgatggaaaaagaagtctttacaccgccaatccacttcctgtggcaactacaggggtagatttagacgttactttacctggggaaggtggaaaagatcgacctttcaaggtgtcaatcaaatttgtctctcgggtgagttggcacctactgcatgaagtactgacaggacggaccttgcctgagccactggaattagacaagccaatcagcactaaccctgtccatgccgttgatgtggtgctacgacatctgccctccatgaaatacacacctgtggggcgttcatttttctccgctccagaaggatatgaccaccctctgggagggggcagggaagtgtggtttggattccatcagtctgttcggcctgccatgtggaaaatgatgcttaatatcgatgtttctgccactgccttctacaaagcacaacctgtaattcagttcatgtgtgaagttcttgatattcataatattgatgagcaaccaagacctctgactgattctcatcgggtaaaattcaccaaagagataaaaggtttgaaggttgaagtgactcattgtggaacaatgagacggaaataccgtgtttgtaatgtaacaaggaggcctgccagtcatcaaacctttcctttacagttagaaaacggccaaactgtggagagaacagtagcgcagtatttcagagaaaagtatactcttcagctgaagtacccgcaccttccctgtctgcaagtcgggcaggaacagaaacacacctacctgccactagaagtctgtaatattgtggcagggcaacgatgtatcaagaagctaacagacaatcagacttccactatgatcaaggcaacagcaagatctgcaccagatagacaagaggaaattagcagattggtaagaagtgcaaattatgaaacagatccatttgttcaggagtttcaatttaaagttcgggatgaaatggctcatgtaactggacgcgtacttccagcacctatgctccagtatggaggacggaatcggacagtagcaacaccgagccatggagtatgggacatgcgagggaaacaattccacacaggagttgaaatcaaaatgtgggctatcgcttgttttgccacacagaggcagtgcagagaagaaatattgaagggtttcacagaccagctgcgtaagatttctaaggatgcagggatgcccatccagggccagccatgcttctgcaaatatgcacagggggcagacagcgtagagcccatgttccggcatctcaagaacacatattctggcctacagcttattatcgtcatcctgccggggaagacaccagtgtatgcggaagtgaaacgtgtaggagacacacttttgggtatggctacacaatgtgttcaagtcaagaatgtaataaaaacatctcctcaaactctgtcaaacttgtgcctaaagataaatgttaaactcggagggatcaataatattcttgtacctcatcaaagaccttctgtgttccagcaaccagtgatctttttgggagccgatgtcactcatccacctgctggtgatggaaagaagccttctattgctgctgttgtaggtagtatggatgcacacccaagcagatactgtgccacagtaagagttcagagaccccgacaggagatcatccaggacttggcctccatggtccgggaacttcttattcaattttataagtcaactcggttcaagcctactcgtatcatcttttatcgggatggtgtttcagaggggcagtttaggcaggtattatattatgaactactagcaattcgagaagcctgcatcagtttggagaaagactatcaacctggaataacctacattgtagttcagaagagacatcacactcgattattttgtgctgataggacagaaagggttggaagaagtggcaatatcccagctggaacaacagttgatacagacattacacacccatatgagttcgatttttacctctgtagccatgctggaatacagggtaccagtcgtccttcacactatcatgttttatgggatgataactgctttactgcagatgaacttcagctgctaacttaccagctctgccacacttacgtacgctgtacacgatctgtttctatacctgcaccagcgtattatgctcacctggtagcatttagagccagatatcatcttgtggacaaagaacatgacagtgctgaaggaagtcacgtttcaggacaaagcaatgggcgagatccacaagctcttgccaaggctgtacagattcaccaagataccttacgcacaatgtacttcgcttaaatagtccaagtatattctctgagaggaagtactgaaagatgaattgacatacaacgtatgtttccagtgaagtcaattgagtaaggacacctccagccatacagaaaccaacactgtgtgggggccaaggtctgatccttatgttaatacaaggaagattgtttacttcatcaaggaacacagcatcattatgcaatatgaaaccagccaactgctttttgtgcggtctcctataggaagtatcgcaattgttttgttttcatttcttgtagtctaacccttttaatgcctttacctcaagttgcttggcagcacaactatctttgcaaaaaaaagtaaagaaaaagtaaatgatggtttaaaaaatacacaccttcatgaataatcaaagtgatttttcagaattatgtgtgcaaaaaattaatgtgcattcatatattcttgtaaaaggtgtctgtgtatttttaaaatatatacatccatacttcatatgcatatatatctagatctggattgataatagatatatatgtgtctgttatatattttagagttcattccattggggaattttctttcccttttattctacccccactaccgcctttatttctctatttcccttgccttcatcacctacatttttttcccagtcctaccagtgacattcaaatgttgatgtatctggttcgtttgaatataaaatatggcaaactagaattctacttttattttgcataccctactcctgactcctatctcatacacaattctgagttctcaactcttgatattgctgtcttaagaaacaaaattttatatatatatgtatacatacatacacagacacagacacacacatatatatacataaaataactttctgtgagagtgcgtctctcccctcccactcagaacatacatttaccatttgcgcaatttgtatataagcagtagcaacctgaactattctttttcttttttctttttcttttctttcttttttttttttaatgagacagagcctcgctctgtcaccaggctggagcaggattgcttgaacctaggaggcggaagttacagtgagccaagactgcaccattgcactccagcctgggcaacaaaaccaaaactccgtctcaaaagaaaaaaaaatcataatgaaaatgaacttaacatatttaaattatttgcaaatagattgtgtttattgaagaatcatattggctagatgcccattttcatttactaaaatgaatcaggaaaatgcaagatgatattttaaaacttttgctaatgtatcaccagtataactttccttttaaaattaaggtgatagtaacaaaggaagttaggactttgatcattttaaatcagttaaatcactgaaacgtgggaaattgttttacaaaacttttattgattacactttaaggtattaaaaagtactataaagctatcaaaactgagtttatcagtaacattggattcaggggagctttgcactttgtaactcatgaaaattgcattttgattt

SEQ ID NO: 777 - DNA, 2184 bp, Homo sapiens
cgaccggaagtccggtcactctcgcgaggccccagagagcaggcgctgggcagtgtggaggtcgttggagtcacttccccgtcaccagctcctgtgcctgccagtcggtgcccctcccgctccagccatgctctccgccctcgcccggcctgccagcgctgctctccgccgcagcttcagcacctcggcccagaacaatgctaaagtagctgtgctaggggcctctggaggcatcgggcagccactttcacttctcctgaagaacagccccttggtgagccgcctgaccctctatgatatcgcgcacacacccggagtggccgcagatctgagccacatcgagaccaaagccgctgtgaaaggctacctcggacctgaacagctgcctgactgcctgaaaggttgtgatgtggtagttattccggctggagtccccagaaagccaggcatgacccgggacgacctgttcaacaccaatgccacgattgtggccaccctgaccgctgcctgtgcccagcactgcccggaagccatgatctgcgtcattgccaatccggttaattccaccatccccatcacagcagaagttttcaagaagcatggagtgtacaaccccaacaaaatcttcggcgtgacgaccctggacatcgtcagagccaacacctttgttgcagagctgaagggtttggatccagctcgagtcaacgtccctgtcattggtggccatgctgggaagaccatcatccccctgatctctcagtgcacccccaaggtggactttccccaggaccagctgacagcactcactgggcggatccaggaggccggcacggaggtggtcaaggctaaagccggagcaggctctgccaccctctccatggcgtatgccggcgcccgctttgtcttctcccttgtggatgcaatgaatggaaaggaaggtgttgtggaatgttccttcgttaagtcacaggaaacggaatgtacctacttctccacaccgctgctgcttgggaaaaagggcatcgagaagaacctgggcatcggcaaagtctcctcttttgaggagaagatgatctcggatgccatccccgagctgaaggcctccatcaagaagggggaagatttcgtgaagaccctgaagtgagccgctgtgacgggtggccagtttccttaatttatgaaggcatcatgtcactgcaaagccgttgcagataaactttgtattttaatttgctttggtgatgattactgtattgacatcatcatgccttccaaattgtgggtggctctgtgggcgcatcatttcttccctgtgagagccaactttagagtgtctgctacctcttcattaccaatcagaattagatgatgtttaactgttagactgaagcgtgacgctttcatcagtagcttcaagaaagtctaaattgttaatttatggaattggacacagtattcagtttacccgtacatgctcctcccgcccctcctgttggcacccttgcatcgcccaggcctgattcctcctgggggtagttcacccccacgggttcatagttcagcggcgaatgccaggcagctgttttctggctgagcaaacagcacctttctcattgagcttcctctactgacctctgtcccccttgggatttcatcttctgaccgaaccctgatgttcagtggcagagacagcccatagccagaactgtgggtagaccagggttggggtgtgcggtttgggacagcccaaaccccagccgctgtgtcaaggcctaggacgccatgctgccatcaaaagggggttccaggtttccatcagtggcctaaagaagggacttcttgttgtactgaggagtgcggaattaaagagatttgactccctttagtattgggggcagtccgttccccagacactgtggcctctgaagtggaaactgaaagctgcatacctgggaaagaactttctaggaataggcaatggccttcagtggaagagggagggctggaggtgtgcccagtacttggatgttcatctgtccacaacagctttttgtttttttaaaaaagctaaaatggaaatggattttatcataaaggatgacatcgttttcttctacaattaatacatgttcattgtataaaacccaaaaagcagctaaaaaataaagcgggaaaggaactact

SEQ ID NO: 778 - DNA, 1244 bp, Homo sapiens
gccagtcggtgcccctcccgctccagccatgctctccgccctcgcccggcctgtcagcgctgctctccgccgcagcttcagcacctcggcccagaacaatgctaaagtagctgtgctaggggcctctggaggcatcgggcagccactttcacttctcctgaagaacagccccttggtgagccgcctgaccctctatgatatcgcgcacacacccggagtggccgcagatctgagccacatcgagaccaaagccgctgtgaaaggctacctcggacctgaacagctgcctgactgcctgaaaggttgtgatgtggtagttattccggctggagtccccagaaagccaggcatgacccgggacgacctgttcaacaccaatgccacgattgtggccaccctgaccgctgcctgtgcccagcactgcccggaagccatgatctgcgtcattgccaatccggttaattccaccatccccatcacagcagaagttttcaagaagcatggagtgtacaaccccaacaaaatcttcggcgtgacgaccctggacatcgtcagagccaacacctttgttgcagagctgaagggtttggatccagctcgagtcaacgtccctgtcattggtggccatgctgggaagaccatcatccccctgatctctcagtgcacccccaaggtggactttccccaggaccagctgacagcactcactgggcggatccaggaggccggcacggaggtggtcaaggctaaagccggagcaggctctgccaccctctccatggcgtatgccggcgcccgctttgtcttctcccttgtggatgcaatgaatggaaaggaaggtgttgtggaatgttccttcgttaagtcacaggaaacggaatgtacctacttctccacaccgctgctgcttgggaaaaagggcatcgagaagaacctgggcatcggcaaagtctcctcttttgaggagaagatgatctcggatgccatccccgagctgaaggcctccatcaagaagggggaagatttcgtgaagaccctgaagtgagccgctgtgacgggtggccagtttccttaatttatgaaggcatcatgtcactgcaaagccgttgcagataaactttgtattttaatttgctttggtgatgattactgtattgacatcatcatgccttccaaattgtgggtggctctgtgggcgcatcaataaaagccgtccttgattttaaaaaaaaaaaaaaaaaaaa

SEQ ID NO: 779 - DNA, 1321 bp, Homo sapiens
ggcgctgggcagtgtggaggtcgttggagtcacttccgcgtcaccagctcctgtgcctgccagtcggtgcccctcccgctccagccatgctctccgccctcgcccggcctgccagcgctgctctccgccgcagcttcagcacctcggcccagaacaatgctaaagtagctgtgctaggggcctctggaggcatcgggcagccactttcacttctcctgaagaacagccccttggtgagccgcctgaccctctatgatatcgcgcacacacccggagtggccgcagatctgagccacatcgagaccaaagccgctgtgaaaggctacctcggacctgaacagctgcctgactgcctgaaaggttgtgatgtggtagttattccggctggagtccccagaaagccaggcatgacccgggacgacctgttcaacaccaatgccacgattgtggccaccctgaccgctgcctgtgcccagcactgcccggaagccatgatctgcgtcattgccaatccggttaattccaccatccccatcacagcagaagttttcaagaagcatggagtgtacaaccccaacaaaatcttcggcgtgacgaccctggacatcgtcagagccaacacctttgttgcagagctgaagggtttggatccagctcgagtcaacgtccctgtcattggtggccatgctgggaagaccatcatccccctgatctctcagtgcacccccaaggtggactttccccaggaccagctgacagcactcactgggcggatccaggaggccggcacggaggtggtcaaggctaaagccggagcaggctctgccaccctctccatggcgtatgccggcgcccgctttgtcttctcccttgtggatgcaatgaatggaaaggaaggtgttgtggaatgttccttcgttaagtcacaggaaacggaatgtacctacttctccacaccgctgctgcttgggaaaaagggcatcgagaagaacctgggcatcggcaaagtctcctcttttgaggagaagatgatctcggatgccatccccgagctgaaggcctccatcaagaagggggaagatttcgtgaagaccctgaagtgagccgctgtgacgggtggccagtttccttaatttatgaaggcatcatgtcactgcaaagccgttgcagataaactttgtattttaatttgctttggtgatgattactgtattgacatcatcatgccttccaaattgtgggtggctctgtgggcgcatcaataaaagccgtccttgattttatttttcaaggtcccttctgtaaaaaaaaaaaaaaaaaa

SEQ ID NO: 780 - DNA, 2237 bp, Homo sapiens
cgaccggaagtccggtcactctcgcgaggccccagagagcaggcgctgggcagtgtggaggtcgttggagtcacttccccgtcaccagctcctgtgcctgccagtcggtgcccctcccgctccagccatgctctccgccctcgcccggcctgccagcgctgctctccgccgcagcttcagcacctcggcccagaacaatgctaaagtagctgtgctaggggcctctggaggcatcgggcagccactttcacttctcctgaagaacagccccttggtgagccgcctgaccctctatgatatcgcgcacacacccggagtggccgcagatctgagccacatcgagaccaaagccgctgtgaaaggctacctcggacctgaacagctgcctgactgcctgaaaggttgtgatgtggtagttattccggctggagtccccagaaagccaggcatgacccgggacgacctgttcaacaccaatgccacgattgtggccaccctgaccgctgcctgtgcccagcactgcccggaagccatgatctgcgtcattgccaatccggttaattccaccatccccatcacagcagaagttttcaagaagcatggagtgtacaaccccaacaaaatcttcggcgtgacgaccctggacatcgtcagagccaacacctttgttgcagagctgaagggtttggatccagctcgagtcaacgtccctgtcattggtggccatgctgggaagaccatcatccccctgatctctcagtgcacccccaaggtggactttccccaggaccagctgacagcactcactgggcggatccaggaggccggcacggaggtggtcaaggctaaagccggagcaggctctgccaccctctccatggcgtatgccggcgcccgctttgtcttctcccttgtggatgcaatgaatggaaaggaaggtgttgtggaatgttccttcgttaagtcacaggaaacggaatgtacctacttctccacaccgctgctgcttgggaaaaagggcatcgagaagaacctgggcatcggcaaagtctcctcttttgaggagaagatgatctcggatgccatccccgagctgaaggcctccatcaagaagggggaagatttcgtgaagaccctgaagtgagccgctgtgacgggtggccagtttccttaatttatgaaggcatcatgtcactgcaaagccgttgcagataaactttgtattttaatttgctttggtgatgattactgtattgacatcatcatgccttccaaattgtgggtggctctgtgggcgcatcaataaaagccgtccttgattttatttttcaaggtcccttctgtaaatgctgtgctttcttccctgtgagagccaactttagagtgtctgctacctcttcattaccaatcagaattagatgatgtttaactgttagactgaagcgtgacgctttcatcagtagcttcaagaaagtctaaattgttaatttatggaattggacacagtattcagtttacccgtacatgctcctcccgcccctcctgttggcacccttgcatcgcccaggcctgattcctcctgggggtagttcacccccacgggttcatagttcagcggcgaatgccaggcagctgttttctggctgagcaaacagcacctttctcattgagcttcctctactgacctctgtcccccttgggatttcatcttctgaccgaaccctgatgttcagtggcagagacagcccatagccagaactgtgggtagaccagggttggggtgtgcggtttgggacagcccaaaccccagccgctgtgtcaaggcctaggacgccatgctgccatcaaaagggggttccaggtttccatcagtggcctaaagaagggacttcttgttgtactgaggagtgcggaattaaagagatttgactccctttagtattgggggcagtccgttccccagacactgtggcctctgaagtggaaactgaaagctgcatacctgggaaagaactttctaggaataggcaatggccttcagtggaagagggagggctggaggtgtgcccagtacttggatgttcatctgtccacaacagctttttgtttttttaaaaaagctaaaatggaaatggattttatcataaaggatgacatcgttttcttctacaattaatacatgttcattgtataaaacccaaaaagcagctaaaaaataaagcgggaaaggaactact

SEQ ID NO: 781 - DNA, 2887 bp, Homo sapiens
ccacgcgtccgagcaagaacagctaaaatgaaagccatcattcatcttactcttcttgctctcctttctgtaaacacagccaccaaccaaggcaactcagctgatgctgtaacaaccacagaaactgcgactagtggtcctacagtagctgcagctgataccactgaaactaatttccctgaaactgctagcaccacagcaaatacaccttctttcccaacagctacttcacctgctccccccataattagtacacatagttcctccacaattcctacacctgctccccccataattagtacacatagttcctccacaattcctatacctactgctgcagacagtgagtcaaccacaaatgtaaattcattagctacctctgacataatcaccgcttcatctccaaatgatggattaatcacaatggttccttctgaaacacaaagtaacaatgaaatgtcccccaccacagaagacaatcaatcatcagggcctcccactggcaccgctttattggagaccagcaccctaaacagcacaggtcccagcaatccttgccaagatgatccctgtgcagataattcgttatgtgttaagctgcataatacaagtttttgcctgtgtttagaagggtattactacaactcttctacatgtaagaaaggaaaggtattccctgggaagatttcagtgacagtatcagaaacatttgacccagaagagaaacattccatggcctatcaagacttgcatagtgaaattactagcttgtttaaagatgtatttggcacatctgtttatggacagactgtaattcttactgtaagcacatctctgtcaccaagatctgaaatgcgtgctgatgacaagtttgttaatgtaacaatagtaacaattttggcagaaaccacaagtgacaatgagaagactgtgactgagaaaattaataaagcaattagaagtagctcaagcaactttctaaactatgatttgacccttcggtgtgattattatggctgtaaccagactgcggatgactgcctcaatggtttagcatgcgattgcaaatctgacctgcaaaggcctaacccacagagccctttctgcgttgcttccagtctcaagtgtcctgatgcctgcaacgcacagcacaagcaatgcttaataaagaagagtggtggggcccctgagtgtgcgtgcgtgcccggctaccaggaagatgctaatgggaactgccaaaagtgtgcatttggctacagtggactcgactgtaaggacaaatttcagctgatcctcactattgtgggcaccatcgctggcattgtcattctcagcatgataattgcattgattgtcacagcaagatcaaataacaaaacgaagcatattgaagaagagaacttgattgacgaagactttcaaaatctaaaactgcggtcgacaggcttcaccaatcttggagcagaagggagcgtctttcctaaggtcaggataacggcctccagagacagccagatgcaaaatccctattcaagacacagcagcatgccccgccctgactattagaatcataagaatgtggaacccgccatggcccccaaccaatgtacaagctattatttagagtgtttagaaagactgatggagaagtgagcaccagtaaagatctggcctccggggtttttcttccatctgacatctgccagcctctctgaatggaagttgtgaatgtttgcaacgaatccagctcacttgctaaataagaatctatgacattaaatgtagtagatgctattagcgcttgtcagagaggtggttttcttcaatcagtacaaagtactgagacaatggttagggttgttttcttaattcttttcctggtagggcaacaagaaccatttccaatctagaggaaagctccccagcattgcttgctcctgggcaaacattgctcttgagttaagtgacctaattcccctgggagacatacgcatcaactgtggaggtccgaggggatgagaagggatacccaccacctttcaagggtcacaagctcactctctgacaagtcagaatagggacactgcttctatccctccaatggagagattctggcaacctttgaacagcccagagcttgcaacctagcctcacccaagaagactggaaagagacatatctctcagctttttcaggaggcgtgcctgggaatccaggaactttttgatgctaattagaaggcctggactaaaaatgtccactatggggtgcactctacagtttttgaaatgctaggaggcagaaggggcagagagtaaaaaacatgacctggtagaaggaagagaggcaaaggaaactgggtggggaggatcaattagagaggaggcacctgggatccaccttcttccttaggtcccctcctccatcagcaaaggagcacttctctaatcatgccctcccgaagactggctgggagaaggtttaaaaacaaaaaatccaggagtaagagccttaggtcagtttgaaattggagacaaactgtctggcaaagggtgcgagagggagcttgtgctcaggagtccagccgtccagcctcggggtgtaggtttctgaggtgtgccattggggcctcagccttctctggtgacagaggctcagctgtggccaccaacacacaaccacacacacacaaccacacacacaaatgggggcaaccacatccagtacaagcttttacaaatgttattagtgtccttttttatttctaatgccttgtcctcttaaaagttattttatttgttattattatttgttcttgactgttaattgtgaatggtaatgcaataaagtgcctttgttagatggtgaaaaaaaaaaaaaaaaaaaa

SEQ ID NO: 782 - DNA, 2859 bp, Homo sapiens
ccaagcaagaacagctaaaatgaaagccatcattcatcttactcttcttgctctcctttctgtaaacacagtcaccaaccaaggcaactcagctgatgctgtaacaaccacagaaactgcgactagtggtcctacagtagctgcagctgataccactgaaactaatttccctgaaactgctagcaccacagcaaatacaccttctttcccaacagctacttcacctgctccccccataattagtacacatagttcctccacaattcctacacctgctccccccataattagtacacatagttcctccacaattcctacacctactgctgcagacagtgagtcaaccacaaatgtaaattcattagctacctctgacataatcaccgcttcatctccaaatgatggattaatcacaatggttccttctgaaacacaaagtaacaatgaaatgtcccccaccacagaagacaatcaatcatcagggcctcccactggcaccgctttattggagaccagcaccctaaacagcacaggtcccagcaatccttgccaagatgatccctgtgcagataattcgttatgtgttaagctgcataatacaagtttttgcctgtgtttagaagggtattactacaactcttctacatgtaagaaaggaaaggtattccctgggaagatttcagtgacagtatcagaaacatttgacccagaagagaaacattccatggcctatcaagacttgcatagtgaaattactagcttgtttaaagatgtatttggcacatctgtttatggacagactgtaattcttactgtaagcacatctctgtcaccaagatctgaaatgcgtgctgatgacaagtttgttaatgtaacaatagtaacaattttggcagaaaccacaagtgacaatgagaagactgtgactgagaaaattaataaagcaattagaagtagctcaagcaactttctaaactatgatttgacccttcggtgtgattattatggctgtaaccagactgcggatgactgcctcaatggtttagcatgcgattgcaaatctgacctgcaaaggcctaacccacagagccctttctgcgttgcttccagtctcaagtgtcctgatgcctgcaacgcacagcacaagcaatgcttaataaagaagagtggtggggcccctgagtgtgcgtgcgtgcccggctaccaggaagatgctaatgggaactgccaaaagtgtgcatttggctacagtggactcgactgtaaggacaaatttcagctgatcctcactattgtgggcaccatcgctggcattgtcattctcagcatgataattgcattgattgtcacagcaagatcaaataacaaaacgaagcatattgaagaagagaacttgattgacgaagactttcaaaatctaaaactgcggtcgacaggcttcaccaatcttggagcagaagggagcgtctttcctaaggtcaggataacggcctccagagacagccagatgcaaaatccctattcaagacacagcagcatgccccgccctgactattagaatcataagaatgtggaacccgccatggcccccaaccaatgtacaagctattatttagagtgtttagaaagactgatggagaagtgagcaccagtaaagatctggcctccggggtttttcttccatctgacatctgccagcctctctgaatggaagttgtgaatgtttgcaacgaatccagctcacttgctaaataagaatctatgacattaaatgtagtagatgctattagcgcttgtcagagaggtggttttcttcaatcagtacaaagtactgagacaatggttagggttgttttcttaattcttttcctggtagggcaacaagaaccatttccaatctagaggaaagctccccagcattgcttgctcctgggcaaacattgctcttgagttaagtgacctaattcccctgggagacatacgcatcaactgtggaggtccgaggggatgagaagggatacccaccacctttcaagggtcacaagctcactctctgacaagtcagaatagggacactgcttctatccctccaatggagagattctggcaacctttgaacagcccagagcttgcaacctagcctcacccaagaagactggaaagagacatatctctcagctttttcaggaggcgtgcctgggaatccaggaactttttgatgctaattagaaggcctggactaaaaatgtccactatggggtgcactctacagtttttgaaatgctaggaggcagaaggggcagagagtaaaaaacatgacctggtagaaggaagagaggcaaaggaaactgggtggggaggatcaattagagaggaggcacctgggatccaccttcttccttaggtcccctcctccatcagcaaaggagcacttctctaatcatgccctcccgaagactggctgggagaaggtttaaaaacaaaaaatccaggagtaagagccttaggtcagtttgaaattggagacaaactgtctggcaaagggtgcgagagggagcttgtgctcaggagtccagccgtccagcctcggggtgtaggtttctgaggtgtgccattggggcctcagccttctctggtgacagaggctcagctgtggccaccaacacacaaccacacacacacaaccacacacacaaatgggggcaaccacatccagtacaagcttttacaaatgttattagtgtccttttttatttctaatgccttgtcctcttaaaagttattttatttgttattattatttgttcttgactgttaattgtgaatggtaatgcaataaagtgcctttgttagatggtg

SEQ ID NO: 783 - DNA, 3631 bp, Homo sapiens
gcttcccatacggcagtggctgggggagagtgatggagagaaaggctaagctaaggtcaaagaaagtggaggaaggctggcttgtcccgctggacttgacggcggagctgctgcaatctcgcgggctgggcccttgccccgggtggacccgagtgcctgcggggaggcgggtgtggctcccccgggaggtgacagctggcggggcccgtaaggagctggtctgctccggctcccctctcgtagccggcgccctgggaccagcgcgtgagcacgtctcggaggagtccgatgcgctgggcagggccgggtggtcacccccgcccagcttccaggggtgactgtgcctctgacgtcagacggtttttgggtcattccctggcacggggactttattttcataacagcatgaagtgccgtggaactggaataggcgtgtcctctccctcgaccctccccctccttgtccctctgctcacccctcgctcgttccctccctccggcgagggccgcctttataacaactgctcagagtgcgagggcgggatagctgtccaaggtctcccccagcactgaggagctcgcctgctgccctcttgcgcgcgggaagcagcaccaagttcacggccaacgccttggcactagggtccagaatggctacaacagtccctgatggttgccgcaatggcctgaaatccaagtactacagactttgtgataaggctgaagcttggggcatcgtcctagaaacggtggccacagccggggttgtgacctcggtggccttcatgctcactctcccgatcctcgtctgcaaggtgcaggactccaacaggcgaaaaatgctgcctactcagtttctcttcctcctgggtgtgttgggcatctttggcctcaccttcgccttcatcatcggactggacgggagcacagggcccacacgcttcttcctctttgggatcctcttttccatctgcttctcctgcctgctggctcatgctgtcagtctgaccaagctcgtccgggggaggaagcccctttccctgttggtgattctgggtctggccgtgggcttcagcctagtccaggatgttatcgctattgaatatattgtcctgaccatgaataggaccaacgtcaatgtcttttctgagctttccgctcctcgtcgcaatgaagactttgtcctcctgctcacctacgtcctcttcttgatggcgctgaccttcctcatgtcctccttcaccttctgtggttccttcacgggctggaagagacatggggcccacatctacctcacgatgctcctctccattgccatctgggtggcctggatcaccctgctcatgcttcctgactttgaccgcaggtgggatgacaccatcctcagctccgccttggctgccaatggctgggtgttcctgttggcttatgttagtcccgagttttggctgctcacaaagcaacgaaaccccatggattatcctgttgaggatgctttctgtaaacctcaactcgtgaagaagagctatggtgtggagaacagagcctactctcaagaggaaatcactcaaggttttgaagagacaggggacacgctctatgccccctattccacacattttcagctgcagaaccagcctccccaaaaggaattctccatcccacgggcccacgcttggccgagcccttacaaagactatgaagtaaagaaagagggcagctaactctgtcctgaagagtgggacaaatgcagccgggcggcagatctagcgggagctcaaagggatgtgggcgaaatcttgagtcttctgagaaaactgtacaagacactacgggaacagtttgcctccctcccagcctcaaccacaattcttccatgctggggctgatgtgggctagtaagactccagttcttagaggcgctgtagtatttttttttttttgtctcatcctttggatacttcttttaagtgggagtctcaggcaactcaagtttagacccttactctttttgtttgttttttgaaacaggatcttgctctgtcacccaggcttgagtgcagtggtgcgatcacagcccagtgcagcctcgaccacctgtgctcaagcaatcctcccatctccatctcccaaagtgctgggatgacaggcgtgagccacagctcccagcctaggcccttaatcttgctgttattttccatggactaaaggtctggtcatctgagctcacgctggctcacacagctctaggggcctgctcctctaactcacagtgggttttgtgaggctctgtggcccagagcagacctgcatatctgagcaaaaatagcaaaagcctctctcagcccactggcctgaatctacactggaagccaacttgctggcacccccgctccccaacccttcttgcctgggtaggagaggctaaagatcaccctaaatttactcatctctctagtgctgcctcacattgggcctcagcagctccccagcaccaattcacaggtcacccctctcttcttgcactgtccccaaacttgctgtcaattccgagatctaatctccccctacgctctgccaggaattctttcagacctcactagcacaagcccggttgctccttgtcaggagaatttgtagatcattctcacttcaaattcctggggctgatacttctctcatcttgcaccccaacctctgtaaatagatttaccgcatttacggctgcattctgtaagtgggcatggtctcctaatggaggagtgttcattgtataataagttattcacctgagtatgcaataaagatgtggtggccactctttcatggtggtggcagcagttaccagtaatgagcattagactctgggggatagaacacgggctgccctgagagcttcatgttggagctgaagttcaaggttcacttcctttgggtttgtacttgacccttcttcatgtgtctctcccgttccctctaaaacaagtgtgtttcccctcatttttgaggctgtcaatggtgtgagagccaggatcatcacggggcctgaggttttactccagaaaagcagaggagtggcaaccttggcttggggtttggcagcccaggaaaggcagggaggagagctcaaagccggtttcatgtttcacccaaggtctaattgtgggagaggacaaatccagatcccctgtttgacagaattagttcacaaatgtctcttggcaaaaacatgtgacacctaaccatgataattgacttaatccaagaaagagctctgtagggcagagcaataggaaatctctctttcgttatggaaaaaaaataatccctctacatagaaactgagtgacatgtaaaaatgtgtagctaagtcagggagttacttcctaagagcctgacgctctgcttttcatcaaaaggaaaaaccagcgtgaggcagaggcgagggaggtggaggtgagtggatgatgtgctgagttagggatgtttatatgccgcaaaggtttggttggtaggcttcgcgctaagattagcctggctttgtactgaaaagggggaaggacacatagtgacacagatccttctggtctttcccaggaggtgtgacctaatgaggtttgttgtgagaata

SEQ ID NO: 784 - DNA, 2456 bp, Homo sapiens
ataacagcatgaagtgccgtggaactggaataggcgtgtcctctccctcgaccctccccctccttgtccctctgctcacccctcgctcgttccctccctccggcgagggccgcctttataacaactgctcagagtgcgagggcgggatagctgtccaaggtctcccccagcactgaggagctcgcctgctgccctcttgcgcgcgggaagcagcaccaagttcacggccaacgccttggcactagggtccagaatggctacaacagtccctgatggttgccgcaatggcctgaaatccaagtactacagactttgtgataaggctgaagcttggggcatcgtcctagaaacggtggccacagccggggttgtgacctcggtggccttcatgctcactctcccgatcctcgtctgcaaggtgcaggactccaacaggcgaaaaatgctgcctactcagtttctcttcctcctgggtgtgttgggcatctttggcctcaccttcgccttcatcatcggactggacgggagcacagggcccacacgcttcttcctctttgggatcctcttttccatctgcttctcctgcctgctggctcatgctgtcagtctgaccaagctcgtccgggggaggaagcccctttccctgttggtgattctgggtctggccgtgggcttcagcctagtccaggatgttatcgctattgaatatattgtcctgaccatgaataggaccaacgtcaatgtcttttctgagctttccgctcctcgtcgcaatgaagactttgtcctcctgctcacctacgtcctcttcttgatggcgctgaccttcctcatgtcctccttcaccttctgtggttccttcacgggctggaagagacatggggcccacatctacctcacgatgctcctctccattgccatctgggtggcctggatcaccctgctcatgcttcctgactttgaccgcaggtgggatgacaccatcctcagctccgccttggctgccaatggctgggtgttcctgttggcttatgttagtcccgagttttggctgctcacaaagcaacgaaaccccatggattatcctgttgaggatgctttctgtaaacctcaactcgtgaagaagagctatggtgtggagaacagagcctactctcaagaggaaatcactcaaggttttgaagagacaggggacacgctctatgccccctattccacacattttcagctgcagaaccagcctccccaaaaggaattctccatcccacgggcccacgcttggccgagcccttacaaagactatgaagtaaagaaagagggcagctaactctgtcctgaagagtgggacaaatgcagccgggcggcagatctagcgggagctcaaagggatgtgggcgaaatcttgagtcttctgagaaaactgtacaagacactacgggaacagtttgcctccctcccagcctcaaccacaattcttccatgctggggctgatgtgggctagtaagactccagttcttagaggcgctgtagtatttttttttttttgtctcatcctttggatacttcttttaagtgggagtctcaggcaactcaagtttagacccttactctttttgtttgttttttgaaacaggatcttgctctgtcacccaggcttgagtgcagtggtgcgatcacagcccagtgcagcctcgaccacctgtgctcaagcaatcctcccatctccatctcccaaagtgctgggatgacaggcgtgagccacagctcccagcctaggcccttaatcttgctgttattttccatggactaaaggtctggtcatctgagctcacgctggctcacacagctctaggggcctgctcctctaactcacagtgggttttgtgaggctctgtggcccagagcagacctgcatatctgagcaaaaatagcaaaagcctctctcagcccactggcctgaatctacactggaagccaacttgctggcacccccgctccccaacccttcttgcctgggtaggagaggctaaagatcaccctaaatttactcatctctctagtgctgcctcacattgggcctcagcagctccccagcaccaattcacaggtcacccctctcttcttgcactgtccccaaacttgctgtcaattccgagatctaatctccccctacgctctgccaggaattctttcagacctcactagcacaagcccggttgctccttgtcaggagaatttgtagatcattctcacttcaaattcctggggctgatacttctctcatcttgcaccccaacctctgtaaatagatttaccgcatttacggctgcattctgtaagtgggcatggtctcctaatggaggagtgttcattgtataataagttattcacctgagtatgcaataaagatgtggtggccactctttcatggtggtggcagcaaaaaaaaaaaaaa

SEQ ID NO: 785 - DNA, 5947 bp, Homo sapiens
caaaggaggctctggcgggcgacggaaggaaccctaaggactctgcaatatgaataattccctagagaacaccatctcctttgaagagtacatccgagtaaaggcacggtctgtcccgcaacacaggatgaaggaatttctggactcactggcctctaaggggccagaagcccttcaggagttccagcagacagccaccactaccatggtgtaccaacagggtgggaactgcatatacacagacagcactgaagtggctgggtctttgcttgaacttgcctgtccagtcaccaccagtgttcagccacaaacccagcaagaacagcagatccaggttcagcagccgcagcaggttcaggtccaggtgcaggtacagcagtctccgcaacaggtctcggctcagctctccccacaactcaccgttcaccagcctactgagcaacccatccaggtccaggtgcagatccaaggccaggcaccacagtcagcagccccctccattcagaccccgtctctgcagagtcccagtccctcgcagctgcaagcagctcagatccaggtgcagcacgtgcaagcagcccagcagatccaggctgcagaaatcccggaggagcacatcccacatcagcaaatccaggctcagctggtggctggccagtctcttgctggtggtcagcagatccaaatccagaccgtgggtgccctttccccaccaccatcccagcagggctcaccccgggaaggggagcggcgggttggcacggccagtgtcctccaaccagtgaagaagcgcaaagtggacatgcccatcactgtgtcctacgccatctcagggcagccggtggccaccgtgctggccattccacagggccagcagcagagttatgtgtctttgaggccagacttactgacagtagacagtgcccacctgtacagtgccactgggaccattactagccctacaggagaaacctggaccatccctgtttattctgcccagccccggggggaccctcagcagcagagcattacccacattgccattccccaggaagcctacaacgcagttcacgtcagtggctcacccacagccctggcagctgttaagctggaggatgacaaggagaagatggtgggcaccacatctgtagtgaaaaactcccatgaagaggtagtgcagacccttgcaaactctctctttccagcacagttcatgaatggcaacatccacattccagtggctgtgcaggctgtggcaggcacgtaccagaatacggctcaaactgtccatatatgggacccccaacagcagccgcagcagcaaactccccaggaacagacaccaccaccacagcagcagcagcagcaactccaagttacttgttcagctcaaactgtccaggttgctgaagttgaaccacagtcacagccacagccttccccagaacttctgcttccaaattctttgaagccagaagaagggcttgaagtatggaaaaactgggcccagaccaagaatgctgaactagagaaggatgctcagaacagattggcacccattgggaggcgccaactgctgcgattccaggaagatctcatctcctctgctgtggcagagttgaattatgggctctgtctaatgacacgggaagctcgaaatggagaaggtgaaccctatgacccagatgtgctctactatattttcctgtgtattcaaaagtatctttttgaaaatggaagggtagatgacattttctccgatctttattatgttcggttcacggagtggctacatgaagttctgaaggatgttcagccccgggtcactccacttggctatgtcttgcccagccacgtgactgaggagatgctatgggagtgcaagcagcttggggctcactccccctccaccttgctgaccaccctcatgttctttaataccaagtaagtgttctagaggctccactgctggcatctgtccagtgaagagtgtggaaactatccaagaggccttctgaattcctctgacatatatttgagaaactgggctactgaaagccctaaccccacttggctgcattttatttggtaaccagtgaggcaaacacccttgccagacccctaccatccatcttgatgtggttcctgcactggacactgcttgggtacttcctattgaagacagtggaccagcacatgaagctggccttctccaaggtcttgcgacagacaaagaagaacccctctaatcccaaggataaaagcacgagtatccggtacttgaaggcccttggaatacaccagactggccagaaagttacagatgacatgtatgcagaacagacggaaaatccagagaatccattgagatgtcccatcaagctctatgatttctacctcttcaaatgcccccagagtgtgaaaggccggaatgacaccttttacctgacacctgagccagtggtggcccccaacagcccaatctggtactcagtccagcctatcagcagagagcagatgggacaaatgctgacgcggatcctggtgataagagaaattcaggaggccatcgcagtggccaatgcaagcactatgcactgagatgccttggccatggcacaagagaaaccagccaggaaaaaccagacagactttcacactaaagaagaggcctccatttttttttttcttttttttattggtgtagttacgaagcctttcaggctgcttctgtttaaaatataaaagaaaactttgccccctttgcatcttcataaacctgctgcggcagactcctcagccgatggtggctctgggtttccttgagtgtcatatgtcctagaaagttgctggctgactcttttttgtctggggcctggggaaagggcttggactgtgaaaagaaatgtggcccctttccatcttcaagagagatggaattaatgatggatggaccctggagggaatctccccagccgacttccactgggctgacagactttgctgaccacaggggaacgatgttcttttctttcttcatgatcagacataaacttagcatcttaatggaagaaaaatgaggggaacttcaattatgatttattaaagacaatttctattacaccctcctttatgacaagtgacattttagatgtaaaagtaaaaactttaccatgccttttttttttttgttggcctaacattgaggccttaaaacctgaggctcctgtgcctgatggaattcttgtaacatacacttgtgtatcatataaagataccactctgtttctcttatgtattcttactctagttgtttattaagaatgacaagcacgtcttttcaacatgttagtgaacaacgtctctttattttggggaggagcccggcgggacagtagaagtaaacccttgcctgttaattgaactggccgaggtcctgcggggagtgtggggtgggacgtgaagtggcagctcctcagtgacaaggccactatgtgctatacgcatgcgctgtttcttcagcgccagctccgcccccgccgcagcgaggcgggtaggttccgcccgcgcgcactacgccctgacgtcagcgtcgcgcgcagcgcagtgacgaaatcggctggtttatattggcgcggcccagacggcagaggtctctgcggcgcggtcctcggagacacgcggcggtgtcctgtgttggccatggccgactacctgattagtgggggcacgtcctacgtgccagacgacggactcacagcacagcagctcttcaactgcggagacggcctcacctacaatgactttctcattctccctgggtacatcgacttcactgcagaccaggtggacctgacttctgctctgaccaagaaaatcactcttaagaccccactggtttcctctcccatggacacagtcacagaggctgggatggccatagcaatggcgcttacaggcggtattggcttcatccaccacaactgtacacctgaattccaggccaatgaagttcggaaagtgaagaaatatgaacagggattcatcacagaccctgtggtcctcagccccaaggatcgcgtgcgggatgtttttgaggccaaggcccggcatggtttctgcggtatcccaatcacagacacaggccggatggggagccgcttggtgggcatcatctcctccagggacattgattttctcaaagaggaggaacatgactgtttcttggaagagataatgacaaagagggaagacttggtggtagcccctgcaggcatcacactgaaggaggcaaatgaaattctgcagcgcagcaagaagggaaagttgcccattgtaaatgaagatgatgagcttgtggccatcattgcccggacagacctgaagaagaatcgggactacccactagcctccaaagatgccaagaaacagctgctgtgtggggcagccattggcactcatgaggatgacaagtataggctggacttgctcgcccaggctggtgtggatgtagtggttttggactcttcccagggaaattccatcttccagatcaatatgatcaagtacatcaaagacaaataccctaatctccaagtcattggaggcaatgtggtcactgctgcccaggccaagaacctcattgatgcaggtgtggatgccctgcgggtgggcatgggaagtggctccatctgcattacgcaggaagtgctggcctgtgggcggccccaagcaacagcagtgtacaaggtgtcagagtatgcacggcgctttggtgttccggtcattgctgatggaggaatccaaaatgtgggtcatattgcgaaagccttggcccttggggcctccacagtcatgatgggctctctcctggctgccaccactgaggcccctggtgaatacttcttttccgatgggatccggctaaagaaatatcgcggtatgggttctctcgatgccatggacaagcacctcagcagccagaacagatatttcagtgaagctgacaaaatcaaagtggcccagggagtgtctggtgctgtgcaggacaaagggtcaatccacaaatttgtcccttacctgattgctggcatccaacactcatgccaggacattggtgccaagagcttgacccaagtccgagccatgatgtactctggggagcttaagtttgagaagagaacgtcctcagcccaggtggaaggtggcgtccatagcctccattcgtatgagaagcggcttttctgaaaagggatccagcacacctcctcggtttttttttcaataaaagtttagaaagaaaaaagtgatgcctgatctttcaacagacaggtggggctctgtagctgccactaccacagatgcacacaaaaacagcaccctcatttccagggggagcctcaggccccgagataaatgtgctccatggacctggaagcgggtagttccaggtccaaaaagttcctcctgaggctgctcacaaaacagctgactatagctatagctatggctcttggggtttcagtctcacactgagcatctgactctggctcccaaggggtcaaagaacaagccctgggactggcatacacagggcatcctgctagcccatagcttggccatataggaccaggtcaacacacatatatattccctaacttgaatctctctcggccaggcacattggctcacgtctgtaatcccagcactttgggaggcaggtggatcacttgaggtcaggagttcgagaccatcctggccaacatggtgaaccctttctctactaaaaatacaaaaattagctgggcgtggtgatgcatacctctagtcccagctactcaggaggctgaggcaggagaatcactgaaacccaggaggcggaggttgcagtgagctgagactgcgccactgcactccaccctggcgaaagagcaagactcatctccag

SEQ ID NO: 786 - DNA, 3539 bp, Homo sapiens
cccccagagtgtgaaaggccggaatgacaccttttacctgacacctgagccagtggtggcccccaacagcccaatctggtactcagtccagcctatcagcagagagcagatgggacaaatgctgacgcggatcctggtgataagagaaattcaggaggccatcgcagtggccaatgcaagcactatgcactgagatgccttggccatggcacaagagaaaccagccaggaaaaaccagacagactttcacactaaagaagaggcctccatttttttttttcttttttttattggtgtagttacgaagcctttcaggctgcttctgtttaaaatataaaagaaaactttgccccctttgcatcttcataaacctgctgcggcagactcctcagccgatggtggctctgggtttccttgagtgtcatatgtcctagaaagttgctggctgactcttttttgtctggggcctggggaaagggcttggactgtgaaaagaaatgtggcccctttccatcttcaagagagatggaattaatgatggatggaccctggagggaatctccccagccgacttccactgggctgacagactttgctgaccacaggggaacgatgttcttttctttcttcatgatcagacataaacttagcatcttaatggaagaaaaatgaggggaacttcaattatgatttattaaagacaatttctattacaccctcctttatgacaagtgacattttagatgtaaaagtaaaaactttaccatgccttttttttttttgttggcctaacattgaggccttaaaacctgaggctcctgtgcctgatggaattcttgtaacatacacttgtgtatcatataaagataccactctgtttctcttatgtattcttactctagttgtttattaagaatgacaagcacgtcttttcaacatgttagtgaacaacgtctctttattttggggaggagcccggcgggacagtagaagtaaacccttgcctgttaattgaactggccgaggtcctgcggggagtgtggggtgggacgtgaagtggcagctcctcagtgacaaggccactatgtgctatacgcatgcgctgtttcttcagcgccagctccgcccccgccgcagcgaggcgggtaggttccgcccgcgcgcactacgccctgacgtcagcgtcgcgcgcagcgcagtgacgaaatcggctggtttatattggcgcggcccagacggcagaggtctctgcggcgcggtcctcggagacacgcggcggtgtcctgtgttggccatggccgactacctgattagtgggggcacgtcctacgtgccagacgacggactcacagcacagcagctcttcaactgcggagacggcctcacctacaatgactttctcattctccctgggtacatcgacttcactgcagaccaggtggacctgacttctgctctgaccaagaaaatcactcttaagaccccactggtttcctctcccatggacacagtcacagaggctgggatggccatagcaatggcgcttacaggcggtattggcttcatccaccacaactgtacacctgaattccaggccaatgaagttcggaaagtgaagaaatatgaacagggattcatcacagaccctgtggtcctcagccccaaggatcgcgtgcgggatgtttttgaggccaaggcccggcatggtttctgcggtatcccaatcacagacacaggccggatggggagccgcttggtgggcatcatctcctccagggacattgattttctcaaagaggaggaacatgactgtttcttggaagagataatgacaaagagggaagacttggtggtagcccctgcaggcatcacactgaaggaggcaaatgaaattctgcagcgcagcaagaagggaaagttgcccattgtaaatgaagatgatgagcttgtggccatcattgcccggacagacctgaagaagaatcgggactacccactagcctccaaagatgccaagaaacagctgctgtgtggggcagccattggcactcatgaggatgacaagtataggctggacttgctcgcccaggctggtgtggatgtagtggttttggactcttcccagggaaattccatcttccagatcaatatgatcaagtacatcaaagacaaataccctaatctccaagtcattggaggcaatgtggtcactgctgcccaggccaagaacctcattgatgcaggtgtggatgccctgcgggtgggcatgggaagtggctccatctgcattacgcaggaagtgctggcctgtgggcggccccaagcaacagcagtgtacaaggtgtcagagtatgcacggcgctttggtgttccggtcattgctgatggaggaatccaaaatgtgggtcatattgcgaaagccttggcccttggggcctccacagtcatgatgggctctctcctggctgccaccactgaggcccctggtgaatacttcttttccgatgggatccggctaaagaaatatcgcggtatgggttctctcgatgccatggacaagcacctcagcagccagaacagatatttcagtgaagctgacaaaatcaaagtggcccagggagtgtctggtgctgtgcaggacaaagggtcaatccacaaatttgtcccttacctgattgctggcatccaacactcatgccaggacattggtgccaagagcttgacccaagtccgagccatgatgtactctggggagcttaagtttgagaagagaacgtcctcagcccaggtggaaggtggcgtccatagcctccattcgtatgagaagcggcttttctgaaaagggatccagcacacctcctcggtttttttttcaataaaagtttagaaagaaaaaagtgatgcctgatctttcaacagacaggtggggctctgtagctgccactaccacagatgcacacaaaaacagcaccctcatttccagggggagcctcaggccccgagataaatgtgctccatggacctggaagcgggtagttccaggtccaaaaagttcctcctgaggctgctcacaaaacagctgactatagctatagctatggctcttggggtttcagtctcacactgagcatctgactctggctcccaaggggtcaaagaacaagccctgggactggcatacacagggcatcctgctagcccatagcttggccatataggaccaggtcaacacacatatatattccctaacttgaatctctctcggccaggcacattggctcacgtctgtaatcccagcactttgggaggcaggtggatcacttgaggtcaggagttcgagaccatcctggccaacatggtgaaccctttctctactaaaaatacaaaaattagctgggcgtggtgatgcatacctctagtcccagctactcaggaggctgaggcaggagaatcactgaaacccaggaggcggaggttgcagtgagctgagactgcgccactgcactccaccctggcgaaagagcaagactcatctccag

SEQ ID NO: 787 - DNA, 1646 bp, Homo sapiens
cggagacacgcggcggtgtcctgtgttggccatggccgactacctgattagtgggggcacgtcctacgtgccagacgacggactcacagcacagcagctcttcaactgcggagacggcctcacctacaatgactttctcattctccctgggtacatcgacttcactgcagaccaggtggacctgacttctgctctgaccaagaaaatcactcttaagaccccactggtttcctctcccatggacacagtcacagaggctgggatggccatagcaatggcgcttacaggcggtattggcttcatccaccacaactgtacacctgaattccaggccaatgaagttcggaaagtgaagaaatatgaacagggattcatcacagaccctgtggtcctcagccccaaggatcgcgtgcgggatgtttttgaggccaaggcccggcatggtttctgcggtatcccaatcacagacacaggccggatggggagccgcttggtgggcatcatctcctccagggacattgattttctcaaagaggaggaacatgactgtttcttggaagagataatgacaaagagggaagacttggtggtagcccctgcaggcatcacactgaaggaggcaaatgaaattctgcagcgcagcaagaagggaaagttgcccattgtaaatgaagatgatgagcttgtggccatcattgcccggacagacctgaagaagaatcgggactacccactagcctccaaagatgccaagaaacagctgctgtgtggggcagccattggcactcatgaggatgacaagtataggctggacttgctcgcccaggctggtgtggatgtagtggttttggactcttcccagggaaattccatcttccagatcaatatgatcaagtacatcaaagacaaataccctaatctccaagtcattggaggcaatgtggtcactgctgcccaggccaagaacctcattgatgcaggtgtggatgccctgcgggtgggcatgggaagtggctccatctgcattacgcaggaagtgctggcctgtgggcggccccaagcaacagcagtgtacaaggtgtcagagtatgcacggcgctttggtgttccggtcattgctgatggaggaatccaaaatgtgggtcatattgcgaaagccttggcccttggggcctccacagtcatgatgggctctctcctggctgccaccactgaggcccctggtgaatacttcttttccgatgggatccggctaaagaaatatcgcggtatgggttctctcgatgccatggacaagcacctcagcagccagaacagatatttcagtgaagctgacaaaatcaaagtggcccagggagtgtctggtgctgtgcaggacaaagggtcaatccacaaatttgtcccttacctgattgctggcatccaacactcatgccaggacattggtgccaagagcttgacccaagtccgagccatgatgtactctggggagcttaagtttgagaagagaacgtcctcagcccaggtggaaggtggcgtccatagcctccattcgtatgagaagcggcttttctgaaaagggatccagcacacctcctcggtttttttttcaataaaagtttagaaagaaaaaaaaaaaaaaaaaa

SEQ ID NO: 788 - DNA, 5726 bp, Homo sapiens
caaaggaggctctggcgggcgacggaaggaaccctaaggactctgcaatatgaataattccctagagaacaccatctcctttgaagagtacatccgagtaaaggcacggtctgtcccgcaacacaggatgaaggaatttctggactcactggcctctaaggggccagaagcccttcaggagttccagcagacagccaccactaccatggtgtaccaacagggtgggaactgcatatacacagacagcactgaagtggctgggtctttgcttgaacttgcctgtccagtcaccaccagtgttcagccacaaacccagcaagaacagcagatccaggttcagcagccgcagcaggttcaggtccaggtgcaggtacagcagtctccgcaacaggtctcggctcagctctccccacaactcaccgttcaccagcctactgagcaacccatccaggtccaggtgcagatccaaggccaggcaccacagtcagcagccccctccattcagaccccgtctctgcagagtcccagtccctcgcagctgcaagcagctcagatccaggtgcagcacgtgcaagcagcccagcagatccaggctgcagaaatcccggaggagcacatcccacatcagcaaatccaggctcagctggtggctggccagtctcttgctggtggtcagcagatccaaatccagaccgtgggtgccctttccccaccaccatcccagcagggctcaccccgggaaggggagcggcgggttggcacggccagtgtcctccaaccagtgaagaagcgcaaagtggacatgcccatcactgtgtcctacgccatctcagggcagccggtggccaccgtgctggccattccacagggccagcagcagagttatgtgtctttgaggccagacttactgacagtagacagtgcccacctgtacagtgccactgggaccattactagccctacaggagaaacctggaccatccctgtttattctgcccagccccggggggaccctcagcagcagagcattacccacattgccattccccaggaagcctacaacgcagttcacgtcagtggctcacccacagccctggcagctgttaagctggaggatgacaaggagaagatggtgggcaccacatctgtagtgaaaaactcccatgaagaggtagtgcagacccttgcaaactctctctttccagcacagttcatgaatggcaacatccacattccagtggctgtgcaggctgtggcaggcacgtaccagaatacggctcaaactgtccatatatgggacccccaacagcagccgcagcagcaaactccccaggaacagacaccaccaccacagcagcagcagcagcaactccaagttacttgttcagctcaaactgtccaggttgctgaagttgaaccacagtcacagccacagccttccccagaacttctgcttccaaattctttgaagccagaagaagggcttgaagtatggaaaaactgggcccagaccaagaatgctgaactagagaaggatgctcagaacagattggcacccattgggaggcgccaactgctgcgattccaggaagatctcatctcctctgctgtggcagagttgaattatgggctctgtctaatgacacgggaagctcgaaatggagaaggtgaaccctatgacccagatgtgctctactatattttcctgtgtattcaaaagtatctttttgaaaatggaagggtagatgacattttctccgatctttattatgttcggttcacggagtggctacatgaagttctgaaggatgttcagccccgggtcactccacttggctatgtcttgcccagccacgtgactgaggagatgctatgggagtgcaagcagcttggggctcactccccctccaccttgctgaccaccctcatgttctttaataccaagtacttcctattgaagacagtggaccagcacatgaagctggccttctccaaggtcttgcgacagacaaagaagaacccctctaatcccaaggataaaagcacgagtatccggtacttgaaggcccttggaatacaccagactggccagaaagttacagatgacatgtatgcagaacagacggaaaatccagagaatccattgagatgtcccatcaagctctatgatttctacctcttcaaatgcccccagagtgtgaaaggccggaatgacaccttttacctgacacctgagccagtggtggcccccaacagcccaatctggtactcagtccagcctatcagcagagagcagatgggacaaatgctgacgcggatcctggtgataagagaaattcaggaggccatcgcagtggccaatgcaagcactatgcactgagatgccttggccatggcacaagagaaaccagccaggaaaaaccagacagactttcacactaaagaagaggcctccatttttttttttcttttttttattggtgtagttacgaagcctttcaggctgcttctgtttaaaatataaaagaaaactttgccccctttgcatcttcataaacctgctgcggcagactcctcagccgatggtggctctgggtttccttgagtgtcatatgtcctagaaagttgctggctgactcttttttgtctggggcctggggaaagggcttggactgtgaaaagaaatgtggcccctttccatcttcaagagagatggaattaatgatggatggaccctggagggaatctccccagccgacttccactgggctgacagactttgctgaccacaggggaacgatgttcttttctttcttcatgatcagacataaacttagcatcttaatggaagaaaaatgaggggaacttcaattatgatttattaaagacaatttctattacaccctcctttatgacaagtgacattttagatgtaaaagtaaaaactttaccatgccttttttttttttgttggcctaacattgaggccttaaaacctgaggctcctgtgcctgatggaattcttgtaacatacacttgtgtatcatataaagataccactctgtttctcttatgtattcttactctagttgtttattaagaatgacaagcacgtcttttcaacatgttagtgaacaacgtctctttattttggggaggagcccggcgggacagtagaagtaaacccttgcctgttaattgaactggccgaggtcctgcggggagtgtggggtgggacgtgaagtggcagctcctcagtgacaaggccactatgtgctatacgcatgcgctgtttcttcagcgccagctccgcccccgccgcagcgaggcgggtaggttccgcccgcgcgcactacgccctgacgtcagcgtcgcgcgcagcgcagtgacgaaatcggctggtttatattggcgcggcccagacggcagaggtctctgcggcgcggtcctcggagacacgcggcggtgtcctgtgttggccatggccgactacctgattagtgggggcacgtcctacgtgccagacgacggactcacagcacagcagctcttcaactgcggagacggcctcacctacaatgactttctcattctccctgggtacatcgacttcactgcagaccaggtggacctgacttctgctctgaccaagaaaatcactcttaagaccccactggtttcctctcccatggacacagtcacagaggctgggatggccatagcaatggcgcttacaggcggtattggcttcatccaccacaactgtacacctgaattccaggccaatgaagttcggaaagtgaagaaatatgaacagggattcatcacagaccctgtggtcctcagccccaaggatcgcgtgcgggatgtttttgaggccaaggcccggcatggtttctgcggtatcccaatcacagacacaggccggatggggagccgcttggtgggcatcatctcctccagggacattgattttctcaaagaggaggaacatgactgtttcttggaagagataatgacaaagagggaagacttggtggtagcccctgcaggcatcacactgaaggaggcaaatgaaattctgcagcgcagcaagaagggaaagttgcccattgtaaatgaagatgatgagcttgtggccatcattgcccggacagacctgaagaagaatcgggactacccactagcctccaaagatgccaagaaacagctgctgtgtggggcagccattggcactcatgaggatgacaagtataggctggacttgctcgcccaggctggtgtggatgtagtggttttggactcttcccagggaaattccatcttccagatcaatatgatcaagtacatcaaagacaaataccctaatctccaagtcattggaggcaatgtggtcactgctgcccaggccaagaacctcattgatgcaggtgtggatgccctgcgggtgggcatgggaagtggctccatctgcattacgcaggaagtgctggcctgtgggcggccccaagcaacagcagtgtacaaggtgtcagagtatgcacggcgctttggtgttccggtcattgctgatggaggaatccaaaatgtgggtcatattgcgaaagccttggcccttggggcctccacagtcatgatgggctctctcctggctgccaccactgaggcccctggtgaatacttcttttccgatgggatccggctaaagaaatatcgcggtatgggttctctcgatgccatggacaagcacctcagcagccagaacagatatttcagtgaagctgacaaaatcaaagtggcccagggagtgtctggtgctgtgcaggacaaagggtcaatccacaaatttgtcccttacctgattgctggcatccaacactcatgccaggacattggtgccaagagcttgacccaagtccgagccatgatgtactctggggagcttaagtttgagaagagaacgtcctcagcccaggtggaaggtggcgtccatagcctccattcgtatgagaagcggcttttctgaaaagggatccagcacacctcctcggtttttttttcaataaaagtttagaaagaaaaaagtgatgcctgatctttcaacagacaggtggggctctgtagctgccactaccacagatgcacacaaaaacagcaccctcatttccagggggagcctcaggccccgagataaatgtgctccatggacctggaagcgggtagttccaggtccaaaaagttcctcctgaggctgctcacaaaacagctgactatagctatagctatggctcttggggtttcagtctcacactgagcatctgactctggctcccaaggggtcaaagaacaagccctgggactggcatacacagggcatcctgctagcccatagcttggccatataggaccaggtcaacacacatatatattccctaacttgaatctctctcggccaggcacattggctcacgtctgtaatcccagcactttgggaggcaggtggatcacttgaggtcaggagttcgagaccatcctggccaacatggtgaaccctttctctactaaaaatacaaaaattagctgggcgtggtgatgcatacctctagtcccagctactcaggaggctgaggcaggagaatcactgaaacccaggaggcggaggttgcagtgagctgagactgcgccactgcactccaccctggcgaaagagcaagactcatctccag

SEQ ID NO: 789 - DNA, 5586 bp, Homo sapiens
caaaggaggctctggcgggcgacggaaggaaccctaaggactctgcaatatgaataattccctagagaacaccatctcctttgaagagtacatccgagtaaaggcacggtctgtcccgcaacacaggatgaaggaatttctggactcactggcctctaaggggccagaagcccttcaggagttccagcagacagccaccactaccatggtgtaccaacagggtgggaactgcatatacacagacagcactgaagtggctgggtctttgcttgaacttgcctgtccagtcaccaccagtgttcagccacaaacccagcaagaacagcagatccaggttcagcagccgcagcaggttcaggtccaggtgcaggtacagcagtctccgcaacaggtctcggctcagctctccccacaactcaccgttcaccagcctactgagcaacccatccaggtccaggtgcagatccaaggccaggcaccacagtcagcagccccctccattcagaccccgtctctgcagagtcccagtccctcgcagctgcaagcagctcagatccaggtgcagcacgtgcaagcagcccagcagatccaggctgcagaaatcccggaggagcacatcccacatcagcaaatccaggctcagctggtggctggccagtctcttgctggtggtcagcagatccaaatccagaccgtgggtgccctttccccaccaccatcccagcagggctcaccccgggaaggggagcggcgggttggcacggccagtgtcctccaaccagtgaagaagcgcaaagtggacatgcccatcactgtgtcctacgccatctcagggcagccggtggccaccgtgctggccattccacagggccagcagcagagttatgtgtctttgaggccagacttactgacagtagacagtgcccacctgtacagtgccactgggaccattactagccctacaggagaaacctggaccatccctgtttattctgcccagccccggggggaccctcagcagcagagcattacccacattgccattccccaggaagcctacaacgcagttcacgtcagtggctcacccacagccctggcagctgttaagctggaggatgacaaggagaagatggtgggcaccacatctgtagtgaaaaactcccatgaagaggtagtgcagacccttgcaaactctctctttccagcacagttcatgaatggcaacatccacattccagtggctgtgcaggctgtggcaggcacgtaccagaatacggctcaaactgtccatatatgggacccccaacagcagccgcagcagcaaactccccaggaacagacaccaccaccacagcagcagcagcagcaactccaagttacttgttcagctcaaactgtccaggttgctgaagttgaaccacagtcacagccacagccttccccagaacttctgcttccaaattctttgaagccagaagaagggcttgaagtatggaaaaactgggcccagaccaagaatgctgaactagagaaggatgctcagaacagattggcacccattgggaggcgccaactgctgcgattccaggaagatctcatctcctctgctgtggcagagttgaattatgggctctgtctaatgacacgggaagctcgaaatggagaaggtgaaccctatgacccagatgtgctctactatattttcctgtgtattcaaaagtatctttttgaaaatggaagggtagatgacattttctccgatctttattatgttcggttcacggagtggctacatgaagttctgaaggatgttcagccccgggtcactccacttggctatgtcttgcccagccacgtgactgaggagatgctatgggagtgcaagcagcttggggctcactccccctccaccttgctgaccaccctcatgttctttaataccaagtacttcctattgaagacagtggaccagcacatgaagctggccttctccaaggtcttgcgacagacaaagaagaacccctctaatcccaaggataaaagcacgagtatccggtacttgaaggcccttggaatacaccagactggccagaaagttacagatgacatgtatgcagaacagacggaaaatccagagaatccattgagatgtcccatcaagctctatgatttctacctcttcaaatgcccccagagtgtgaaaggccggaatgacaccttttacctgacacctgagccagtggtggcccccaacagcccaatctggtactcagtccagcctatcagcagagagcagatgggacaaatgctgacgcggatcctggtgataagagaaattcaggaggccatcgcagtggccaatgcaagcactatgcactgagatgccttggccatggcacaagagaaaccagccaggaaaaaccagacagactttcacactaaagaagaggcctccatttttttttttcttttttttattggtgtagttacgaagcctttcaggctgcttctgtttaaaatataaaagaaaactttgccccctttgcatcttcataaacctgctgcggcagactcctcagccgatggtggctctgggtttccttgagtgtcatatgtcctagaaagttgctggctgactcttttttgtctggggcctggggaaagggcttggactgtgaaaagaaatgtggcccctttccatcttcaagagagatggaattaatgatggatggaccctggagggaatctccccagccgacttccactgggctgacagactttgctgaccacaggggaacgatgttcttttctttcttcatgatcagacataaacttagcatcttaatggaagaaaaatgaggggaacttcaattatgatttattaaagacaatttctattacaccctcctttatgacaagtgacattttagatgtaaaagtaaaaactttaccatgccttttttttttttgttggcctaacattgaggccttaaaacctgaggctcctgtgcctgatggaattcttgtaacatacacttgtgtatcatataaagataccactctgtttctcttatgtattcttactctagttgtttattaagaatgacaagcacgtcttttcaacatgttagtgaacaacgtctctttattttggggaggagcccggcgggacagtagaagtaaacccttgcctgttaattgaactggccgaggtcctgcggggagtgtggggtgggacgtgaagtggcagctcctcagtgacaaggccactatgtgctatacgcatgcgctgtttcttcagcgccagctccgcccccgccgcagcgaggcgggtaggttccgcccgcgcgcactacgccctgacgtcagcgtcgcgcgcagcgcagtgacgaaatcggctggtttatattggcgcggcccagacggcagaggtctctgcggcgcggtcctcggagacacgcggcggtgtcctgtgttggccatggccgactacctgattagtgggggcacgtcctacgtgccagacgacggactcacagcacagacttctgctctgaccaagaaaatcactcttaagaccccactggtttcctctcccatggacacagtcacagaggctgggatggccatagcaatggcgcttacaggcggtattggcttcatccaccacaactgtacacctgaattccaggccaatgaagttcggaaagtgaagaaatatgaacagggattcatcacagaccctgtggtcctcagccccaaggatcgcgtgcgggatgtttttgaggccaaggcccggcatggtttctgcggtatcccaatcacagacacaggccggatggggagccgcttggtgggcatcatctcctccagggacattgattttctcaaagaggaggaacatgactgtttcttggaagagataatgacaaagagggaagacttggtggtagcccctgcaggcatcacactgaaggaggcaaatgaaattctgcagcgcagcaagaagggtgcccggacagacctgaagaagaatcgggactacccactagcctccaaagatgccaagaaacagctgctgtgtggggcagccattggcactcatgaggatgacaagtataggctggacttgctcgcccaggctggtgtggatgtagtggttttggactcttcccagggaaattccatcttccagatcaatatgatcaagtacatcaaagacaaataccctaatctccaagtcattggaggcaatgtggtcactgctgcccaggccaagaacctcattgatgcaggtgtggatgccctgcgggtgggcatgggaagtggctccatctgcattacgcaggaagtgctggcctgtgggcggccccaagcaacagcagtgtacaaggtgtcagagtatgcacggcgctttggtgttccggtcattgctgatggaggaatccaaaatgtgggtcatattgcgaaagccttggcccttggggcctccacagtcatgatgggctctctcctggctgccaccactgaggcccctggtgaatacttcttttccgatgggatccggctaaagaaatatcgcggtatgggttctctcgatgccatggacaagcacctcagcagccagaacagatatttcagtgaagctgacaaaatcaaagtggcccagggagtgtctggtgctgtgcaggacaaagggtcaatccacaaatttgtcccttacctgattgctggcatccaacactcatgccaggacattggtgccaagagcttgacccaaagccatgatgtactctggggagcttaagtttgagaagagaacgtcctcagcccaggtggaaggtggcgtccatagcctccattcgtatgagaagcggcttttctgaaaagggatccagcacacctcctcggtttttttttcaataaaagtttagaaagaaaaaagtgatgcctgatctttcaacagacaggtggggctctgtagctgccactaccacagatgcacacaaaaacagcaccctcatttccagggggagcctcaggccccgagataaatgtgctccatggacctggaagcgggtagttccaggtccaaaaagttcctcctgaggctgctcacaaaacagctgactatagctatagctatggctcttggggtttcagtctcacactgagcatctgactctggctcccaaggggtcaaagaacaagccctgggactggcatacacagggcatcctgctagcccatagcttggccatataggaccaggtcaacacacatatatattccctaacttgaatctctctcggccaggcacattggctcacgtctgtaatcccagcactttgggaggcaggtggatcacttgaggtcaggagttcgagaccatcctggccaacatggtgaaccctttctctactaaaaatacaaaaattagctgggcgtggtgatgcatacctctagtcccagctactcaggaggctgaggcaggagaatcactgaaacccaggaggcggaggttgcagtgagctgagactgcgccactgcactccaccctggcgaaagagcaagactcatctccag

SEQ ID NO: 790 - DNA, 5727 bp, Homo sapiens
caaaggaggctctggcgggcgacggaaggaaccctaaggactctgcaatatgaataattccctagagaacaccatctcctttgaagagtacatccgagtaaaggcacggtctgtcccgcaacacaggatgaaggaatttctggactcactggcctctaaggggccagaagcccttcaggagttccagcagacagccaccactaccatggtgtaccaacagggtgggaactgcatatacacagacagcactgaagtggctgggtctttgcttgaacttgcctgtccagtcaccaccagtgttcagccacaaacccagcaagaacagcagatccaggttcagcagccgcagcaggttcaggtccaggtgcaggtacagcagtctccgcaacaggtctcggctcagctctccccacaactcaccgttcaccagcctactgagcaacccatccaggtccaggtgcagatccaaggccaggcaccacagtcagcagccccctccattcagaccccgtctctgcagagtcccagtccctcgcagctgcaagcagctcagatccaggtgcagcacgtgcaagcagcccagcagatccaggctgcagaaatcccggaggagcacatcccacatcagcaaatccaggctcagctggtggctggccagtctcttgctggtggtcagcagatccaaatccagaccgtgggtgccctttccccaccaccatcccagcagggctcaccccgggaaggggagcggcgggttggcacggccagtgtcctccaaccagtgaagaagcgcaaagtggacatgcccatcactgtgtcctacgccatctcagggcagccggtggccaccgtgctggccattccacagggccagcagcagagttatgtgtctttgaggccagacttactgacagtagacagtgcccacctgtacagtgccactgggaccattactagccctacaggagaaacctggaccatccctgtttattctgcccagccccggggggaccctcagcagcagagcattacccacattgccattccccaggaagcctacaacgcagttcacgtcagtggctcacccacagccctggcagctgttaagctggaggatgacaaggagaagatggtgggcaccacatctgtagtgaaaaactcccatgaagaggtagtgcagacccttgcaaactctctctttccagcacagttcatgaatggcaacatccacattccagtggctgtgcaggctgtggcaggcacgtaccagaatacggctcaaactgtccatatatgggacccccaacagcagccgcagcagcaaactccccaggaacagacaccaccaccacagcagcagcagcagcaactccaagttacttgttcagctcaaactgtccaggttgctgaagttgaaccacagtcacagccacagccttccccagaacttctgcttccaaattctttgaagccagaagaagggcttgaagtatggaaaaactgggcccagaccaagaatgctgaactagagaaggatgctcagaacagattggcacccattgggaggcgccaactgctgcgattccaggaagatctcatctcctctgctgtggcagagttgaattatgggctctgtctaatgacacgggaagctcgaaatggagaaggtgaaccctatgacccagatgtgctctactatattttcctgtgtattcaaaagtatctttttgaaaatggaagggtagatgacattttctccgatctttattatgttcggttcacggagtggctacatgaagttctgaaggatgttcagccccgggtcactccacttggctatgtcttgcccagccacgtgactgaggagatgctatgggagtgcaagcagcttggggctcactccccctccaccttgctgaccaccctcatgttctttaataccaagtacttcctattgaagacagtggaccagcacatgaagctggccttctccaaggtcttgcgacagacaaagaagaacccctctaatcccaaggataaaagcacgagtatccggtacttgaaggcccttggaatacaccagactggccagaaagttacagatgacatgtatgcagaacagacggaaaatccagagaatccattgagatgtcccatcaagctctatgatttctacctcttcaaatgcccccagagtgtgaaaggccggaatgacaccttttacctgacacctgagccagtggtggcccccaacagcccaatctggtactcagtccagcctatcagcagagagcagatgggacaaatgctgacgcggatcctggtgataagagaaattcaggaggccatcgcagtggccaatgcaagcactatgcactgagatgccttggccatggcacaagagaaaccagccaggaaaaaccagacagactttcacactaaagaagaggcctccatttttttttttcttttttttattggtgtagttacgaagcctttcaggctgcttctgtttaaaatataaaagaaaactttgccccctttgcatcttcataaacctgctgcggcagactcctcagccgatggtggctctgggtttccttgagtgtcatatgtcctagaaagttgctggctgactcttttttgtctggggcctggggaaagggcttggactgtgaaaagaaatgtggcccctttccatcttcaagagagatggaattaatgatggatggaccctggagggaatctccccagccgacttccactgggctgacagactttgctgaccacaggggaacgatgttcttttctttcttcatgatcagacataaacttagcatcttaatggaagaaaaatgaggggaacttcaattatgatttattaaagacaatttctattacaccctcctttatgacaagtgacattttagatgtaaaagtaaaaactttaccatgccttttttttttttgttggcctaacattgaggccttaaaacctgaggctcctgtgcctgatggaattcttgtaacatacacttgtgtatcatataaagataccactctgtttctcttatgtattcttactctagttgtttattaagaatgacaagcacgtcttttcaacatgttagtgaacaacgtctctttattttggggaggagcccggcgggacagtagaagtaaacccttgcctgttaattgaactggccgaggtcctgcggggagtgtggggtgggacgtgaagtggcagctcctcagtgacaaggccactatgtgctatacgcatgcgctgtttcttcagcgccagctccgcccccgccgcagcgaggcgggtaggttccgcccgcgcgcactacgccctgacgtcagcgtcgcgcgcagcgcagtgacgaaatcggctggtttatattggcgcggcccagacggcagaggtctctgcggcgcggtcctcggagacacgcggcggtgtcctgtgttggccatggccgactacctgattagtgggggcacgtcctacgtgccagacgacggactcacagcacagcagctcttcaactgcggagacggcctcacctacaatgactttctcattctccctgggtacatcgacttcactgcagaccaggtggacctgacttctgctctgaccaagaaaatcactcttaagaccccactggtttcctctcccatggacacagtcacagaggctgggatggccatagcaatggcgcttacaggcggtattggcttcatccaccacaactgtacacctgaattccaggccaatgaagttcggaaagtgaagaaatatgaacagggattcatcacagaccctgtggtcctcagccccaaggatcgcgtgcgggatgtttttgaggccaaggcccggcatggtttctgcggtatcccaatcacagacacaggccggatggggagccgcttggtgggcatcatctcctccagggacattgattttctcaaagaggaggaacatgactgtttcttggaagagataatgacaaagagggaagacttggtggtagcccctgcaggcatcacactgaaggaggcaaatgaaattctgcagcgcagcaagaagggaaagttgcccattgtaaatgaagatgatgagcttgtggccatcattgcccggacagacctgaagaagaatcgggactacccactagcctccaaagatgccaagaaacagctgctgtgtggggcagccattggcactcatgaggatgacaagtataggctggacttgctcgcccaggctggtgtggatgtagtggttttggactcttcccagggaaattccatcttccagatcaatatgatcaagtacatcaaagacaaataccctaatctccaagtcattggaggcaatgtggtcactgctgcccaggccaagaacctcattgatgcaggtgtggatgccctgcgggtgggcatgggaagtggctccatctgcattacgcaggaagtgctggcctgtgggcggccccaagcaacagcagtgtacaaggtgtcagagtatgcacggcgctttggtgttccggtcattgctgatggaggaatccaaaatgtgggtcatattgcgaaagccttggcccttggggctgtccgcagtcatgatgggctctctcctggctgccaccactgaggcccctggtgaatacttcttttccgatgggatccggctaaagaaatatcgcggtatgggttctctcgatgccatggacaagcacctcagcagccagaacagatatttcagtgaagctgacaaaatcaaagtggcccagggagtgtctggtgctgtgcaggacaaagggtcaatccacaaatttgtcccttacctgattgctggcatccaacactcatgccaggacattggtgccaagagcttgacccaagtccgagccatgatgtactctggggagcttaagtttgagaagagaacgtcctcagcccaggtggaaggtggcgtccatagcctccattcgtatgagaagcggcttttctgaaaagggatccagcacacctcctcggtttttttttcaataaaagtttagaaagaaaaaagtgatgcctgatctttcaacagacaggtggggctctgtagctgccactaccacagatgcacacaaaaacagcaccctcatttccagggggagcctcaggccccgagataaatgtgctccatggacctggaagcgggtagttccaggtccaaaaagttcctcctgaggctgctcacaaaacagctgactatagctatagctatggctcttggggtttcagtctcacactgagcatctgactctggctcccaaggggtcaaagaacaagccctgggactggcatacacagggcatcctgctagcccatagcttggccatataggaccaggtcaacacacatatatattccctaacttgaatctctctcggccaggcacattggctcacgtctgtaatcccagcactttgggaggcaggtggatcacttgaggtcaggagttcgagaccatcctggccaacatggtgaaccctttctctactaaaaatacaaaaattagctgggcgtggtgatgcatacctctagtcccagctactcaggaggctgaggcaggagaatcactgaaacccaggaggcggaggttgcagtgagctgagactgcgccactgcactccaccctggcgaaagagcaagactcatctccag

SEQ ID NO: 791 - DNA, 4978 bp, Homo sapiens
caaaggaggctctggcgggcgacggaaggaaccctaaggactctgcaatatgaataattccctagagaacaccatctcctttgaagagtacatccgagtaaaggcacggtctgtcccgcaacacaggatgaaggaatttctggactcactggcctctaaggggccagaagcccttcaggagttccagcagacagccaccactaccatggtgtaccaacagggtgggaactgcatatacacagacagcactgaagtggctgggtctttgcttgaacttgcctgtccagtcaccaccagtgttcagccacaaacccagcaagaacagcagatccaggttcagcagccgcagcaggttcaggtccaggtgcaggtacagcagtctccgcaacaggtctcggctcagctctccccacaactcaccgttcaccagcctactgagcaacccatccaggtccagcacagttcatgaatggcaacatccacattccagtggctgtgcaggctgtggcaggcacgtaccagaatacggctcaaactgtccatatatgggacccccaacagcagccgcagcagcaaactccccaggaacagacaccaccaccacagcagcagcagcagcaactccaagttacttgttcagctcaaactgtccaggttgctgaagttgaaccacagtcacagccacagccttccccagaacttctgcttccaaattctttgaagccagaagaagggcttgaagtatggaaaaactgggcccagaccaagaatgctgaactagagaaggatgctcagaacagattggcacccattgggaggcgccaactgctgcgattccaggaagatctcatctcctctgctgtggcagagttgaattatgggctctgtctaatgacacgggaagctcgaaatggagaaggtgaaccctatgacccagatgtgctctactatattttcctgtgtattcaaaagtatctttttgaaaatggaagggtagatgacattttctccgatctttattatgttcggttcacggagtggctacatgaagttctgaaggatgttcagccccgggtcactccacttggctatgtcttgcccagccacgtgactgaggagatgctatgggagtgcaagcagcttggggctcactccccctccaccttgctgaccaccctcatgttctttaataccaagtacttcctattgaagacagtggaccagcacatgaagctggccttctccaaggtcttgcgacagacaaagaagaacccctctaatcccaaggataaaagcacgagtatccggtacttgaaggcccttggaatacaccagactggccagaaagttacagatgacatgtatgcagaacagacggaaaatccagagaatccattgagatgtcccatcaagctctatgatttctacctcttcaaatgcccccagagtgtgaaaggccggaatgacaccttttacctgacacctgagccagtggtggcccccaacagcccaatctggtactcagtccagcctatcagcagagagcagatgggacaaatgctgacgcggatcctggtgataagagaaattcaggaggccatcgcagtggccaatgcaagcactatgcactgagatgccttggccatggcacaagagaaaccagccaggaaaaaccagacagactttcacactaaagaagaggcctccatttttttttttcttttttttattggtgtagttacgaagcctttcaggctgcttctgtttaaaatataaaagaaaactttgccccctttgcatcttcataaacctgctgcggcagactcctcagccgatggtggctctgggtttccttgagtgtcatatgtcctagaaagttgctggctgactcttttttgtctggggcctggggaaagggcttggactgtgaaaagaaatgtggcccctttccatcttcaagagagatggaattaatgatggatggaccctggagggaatctccccagccgacttccactgggctgacagactttgctgaccacaggggaacgatgttcttttctttcttcatgatcagacataaacttagcatcttaatggaagaaaaatgaggggaacttcaattatgatttattaaagacaatttctattacaccctcctttatgacaagtgacattttagatgtaaaagtaaaaactttaccatgccttttttttttttgttggcctaacattgaggccttaaaacctgaggctcctgtgcctgatggaattcttgtaacatacacttgtgtatcatataaagataccactctgtttctcttatgtattcttactctagttgtttattaagaatgacaagcacgtcttttcaacatgttagtgaacaacgtctctttattttggggaggagcccggcgggacagtagaagtaaacccttgcctgttaattgaactggccgaggtcctgcggggagtgtggggtgggacgtgaagtggcagctcctcagtgacaaggccactatgtgctatacgcatgcgctgtttcttcagcgccagctccgcccccgccgcagcgaggcgggtaggttccgcccgcgcgcactacgccctgacgtcagcgtcgcgcgcagcgcagtgacgaaatcggctggtttatattggcgcggcccagacggcagaggtctctgcggcgcggtcctcggagacacgcggcggtgtcctgtgttggccatggccgactacctgattagtgggggcacgtcctacgtgccagacgacggactcacagcacagcagctcttcaactgcggagacggcctcacctacaatgactttctcattctccctgggtacatcgacttcactgcagaccaggtggacctgacttctgctctgaccaagaaaatcactcttaagaccccactggtttcctctcccatggacacagtcacagaggctgggatggccatagcaatggcgcttacaggcggtattggcttcatccaccacaactgtacacctgaattccaggccaatgaagttcggaaagtgaagaaatatgaacagggattcatcacagaccctgtggtcctcagccccaaggatcgcgtgcgggatgtttttgaggccaaggcccggcatggtttctgcggtatcccaatcacagacacaggccggatggggagccgcttggtgggcatcatctcctccagggacattgattttctcaaagaggaggaacatgactgtttcttggaagagataatgacaaagagggaagacttggtggtagcccctgcaggcatcacactgaaggaggcaaatgaaattctgcagcgcagcaagaagggaaagttgcccattgtaaatgaagatgatgagcttgtggccatcattgcccggacagacctgaagaagaatcgggactacccactagcctccaaagatgccaagaaacagctgctgtgtggggcagccattggcactcatgaggatgacaagtataggctggacttgctcgcccaggctggtgtggatgtagtggttttggactcttcccagggaaattccatcttccagatcaatatgatcaagtacatcaaagacaaataccctaatctccaagtcattggaggcaatgtggtcactgctgcccaggccaagaacctcattgatgcaggtgtggatgccctgcgggtgggcatgggaagtggctccatctgcattacgcaggaagtgctggcctgtgggcggccccaagcaacagcagtgtacaaggtgtcagagtatgcacggcgctttggtgttccggtcattgctgatggaggaatccaaaatgtgggtcatattgcgaaagccttggcccttggggcctccacagtcatgatgggctctctcctggctgccaccactgaggcccctggtgaatacttcttttccgatgggatccggctaaagaaatatcgcggtatgggttctctcgatgccatggacaagcacctcagcagccagaacagatatttcagtgaagctgacaaaatcaaagtggcccagggagtgtctggtgctgtgcaggacaaagggtcaatccacaaatttgtcccttacctgattgctggcatccaacactcatgccaggacattggtgccaagagcttgacccaagtccgagccatgatgtactctggggagcttaagtttgagaagagaacgtcctcagcccaggtggaaggtggcgtccatagcctccattcgtatgagaagcggcttttctgaaaagggatccagcacacctcctcggtttttttttcaataaaagtttagaaagaaaaaagtgatgcctgatctttcaacagacaggtggggctctgtagctgccactaccacagatgcacacaaaaacagcaccctcatttccagggggagcctcaggccccgagataaatgtgctccatggacctggaagcgggtagttccaggtccaaaaagttcctcctgaggctgctcacaaaacagctgactatagctatagctatggctcttggggtttcagtctcacactgagcatctgactctggctcccaaggggtcaaagaacaagccctgggactggcatacacagggcatcctgctagcccatagcttggccatataggaccaggtcaacacacatatatattccctaacttgaatctctctcggccaggcacattggctcacgtctgtaatcccagcactttgggaggcaggtggatcacttgaggtcaggagttcgagaccatcctggccaacatggtgaaccctttctctactaaaaatacaaaaattagctgggcgtggtgatgcatacctctagtcccagctactcaggaggctgaggcaggagaatcactgaaacccaggaggcggaggttgcagtgagctgagactgcgccactgcactccaccctggcgaaagagcaagactcatctccag

SEQ ID NO: 792 - DNA, 4058 bp, Homo sapiens
cagcggccgggaaggggcggtgcgggaggcggggtgtggggcggtagtgtgggccctgttcctgcccgcgcggtgttccgcattctgcaagcctccggagcgcacgtcggcagtcggctccctcgttgaccgaatcaccgacctctctccccagctgtatttccaaaatgtcgctttctaacaagctgacgctggacaagctggacgttaaagggaagcgggtcgttatgagagtcgacttcaatgttcctatgaagaacaaccagataacaaacaaccagaggattaaggctgctgtcccaagcatcaaattctgcttggacaatggagccaagtcggtagtccttatgagccacctaggccggcctgatggtgtgcccatgcctgacaagtactccttagagccagttgctgtagaactcaaatctctgctgggcaaggatgttctgttcttgaaggactgtgtaggcccagaagtggagaaagcctgtgccaacccagctgctgggtctgtcatcctgctggagaacctccgctttcatgtggaggaagaagggaagggaaaagatgcttctgggaacaaggttaaagccgagccagccaaaatagaagctttccgagcttcactttccaagctaggggatgtctatgtcaatgatgcttttggcactgctcacagagcccacagctccatggtaggagtcaatctgccacagaaggctggtgggtttttgatgaagaaggagctgaactactttgcaaaggccttggagagcccagagcgacccttcctggccatcctgggcggagctaaagttgcagacaagatccagctcatcaataatatgctggacaaagtcaatgagatgattattggtggtggaatggcttttaccttccttaaggtgctcaacaacatggagattggcacttctctgtttgatgaagagggagccaagattgtcaaagacctaatgtccaaagctgagaagaatggtgtgaagattaccttgcctgttgactttgtcactgctgacaagtttgatgagaatgccaagactggccaagccactgtggcttctggcatacctgctggctggatgggcttggactgtggtcctgaaagcagcaagaagtatgctgaggctgtcactcgggctaagcagattgtgtggaatggtcctgtgggggtatttgaatgggaagcttttgcccggggaaccaaagctctcatggatgaggtggtgaaagccacttctaggggctgcatcaccatcataggtggtggagacactgccacttgctgtgccaaatggaacacggaggataaagtcagccatgtgagcactgggggtggtgccagtttggagctcctggaaggtaaagtccttcctggggtggatgctctcagcaatatttagtactttcctgccttttagttcctgtgcacagcccctaagtcaacttagcattttctgcatctccacttggcattagctaaaaccttccatgtcaagattcagctagtggccaagagatgcagtgccaggaacccttaaacagttgcacagcatctcagctcatcttcactgcaccctggatttgcatacattcttcaagatcccatttgaattttttagtgactaaaccattgtgcattctagagtgcatatatttatattttgcctgttaaaaagaaagtgagcagtgttagcttagttctcttttgatgtaggttattatgattagctttgtcactgtttcactactcagcatggaaacaagatgaaattccatttgtaggtagtgagacaaaattgatgatccattaagtaaacaataaaagtgtccattgaaaccgtgatttttttttttttcctgtcatactttgttaggaagggtgagaatagaatcttgaggaacggatcagatgtctatattgctgaatgcaagaagtggggcagcagcagtggagagatgggacaattagataaatgtccattctttatcaagggcctactttatggcagacattgtgctagtgcttttattctaacttttatttttatcagttacacatgatcataatttaaaaagtcaaggcttataacaaaaaagccccagcccattcctcccattcaagattcccactccccagaggtgaccactttcaactcttgagtttttcaggtatatacctccatgtttctaagtaatatgcttatattgttcacttcttttttttttattttttaaagaaatctatttcataccatggaggaaggctctgttccacatatatttccacttcttcattctctcggtatagttttgtcacaattatagattagatcaaaagtctacataactaatacagctgagctatgtagtatgctatgattaaatttacttatgtaacttttattgtctttggcattaacagtgtttcaaaaaattttctgtgtatacccatcagtgattcattcccaaatcttctagaagcataagtgtctcaatatattaaaacatattgaataatccttgttagagttatccctgcaggagtccttagtgctcctttatccaatttgtacttgatgccctctaggcagggtgtacagctagctgttgctctggtatttcctataaccttcttggggatttcttttacctcctgtgttagactcctgttttctggattcccccttttccctctttcttggtctactttttgtagaacacaagactctactagcttcctgagaaagggtgcctgggaggcaaaatctctaagactttgtaagtctgaaaatgtctttattcgacccttatacttgattcctagtttggctatatatagaattttagcctgagtatcactttttgagactcgaagccactgtttcattgtcactattgagaatctaaatggccattcggattctttcatcatctttataattttaccttcctatttctttcctgtccttttaatggagttttgggagagagcagaggtaaacatgatttgaaaaagccatgtctgaccagaaattctgtgctggcaagatatgtatttcacctttagggacaaagaaataaacttttggacaggaccacagagctagtaagtaacagcagggattcaagtccaggtttgtctggttccagtggctgatgcttttccaatgtgcctccgtccctgacatgatgcttctaggctatagatgcttctagactctatccctgacatgatgcttctagactattttgtttaaccctggatagaatagcaaaagaaaattttggtggttgctctaaacaaaacagaaatttgaaagctcaagttttttcttcatttgtattttagttaatactgtacccatatttgtagttaattttaaattgtaccatgtttctgcatacctctatgggtactcaggaattctagtccaatttttgtgactttttcctactgattacctttcctccaacgttttaaaaattatttcaaatggaactgaaagaagcataaactcccataaacccagcacctagactctacaattgccaacattatctatccaacaatctctgactgtaccttttaagtactttctactggactgtttccaggatcacccctcatttatttgggttgttaacctaaagaatgaatgggggaatctccagtcataaacaacttgtcaattaggcaaatatttgagttccttctatgtgcttaaagacgtgatagagggaatataagagcatttatgttctgaaggaatttttaacctaaccaaagaagatagtagataacttgtgtgcatataagctagaacagtataaggggccgggcatggtggcttacgcctgtaatcccaggactttgggaggccaaggctggtctcgaactcctggcctcaagtgatcctcccgcctcggtctcccaaagtgctgggattacaggtgtgagccattgtaccctgccaataattgtgtatatgtacgggatataatgtgatgttctgatctatgtatagataaagattaaa

SEQ ID NO: 793 - DNA, 3905 bp, Homo sapiens
cagcggccgggaaggggcggtgcgggaggcggggtgtggggcggtagtgtgggccctgttcctgcccgcgcggtgttccgcattctgcaagcctccggagcgcacgtcggcagtcggctccctcgttgaccgaatcaccgacctctctccccagctgtatttccaaaatgtcgctttctaacaagctgacgctggacaagctggacgttaaagggaagcgggtcgttatgagagtcgacttcaatgttcctatgaagaacaaccagataacaaacaaccagaggattaaggctgctgtcccaagcatcaaattctgcttggacaatggagccaagtcggtagtccttatgagccacctaggccggcctgatggtgtgcccatgcctgacaagtactccttagagccagttgctgtagaactcaaatctctgctgggcaaggatgttctgttcttgaaggactgtgtaggcccagaagtggagaaagcctgtgccaacccagctgctgggtctgtcatcctgctggagaacctccgctttcatgtggaggaagaagggaagggaaaagatgcttctgggaacaaggttaaagccgagccagccaaaatagaagctttccgagcttcactttccaagctaggggatgtctatgtcaatgatgcttttggcactgctcacagagcccacagctccatggtaggagtcaatctgccacagaaggctggtgggtttttgatgaagaaggagctgaactactttgcaaaggccttggagagcccagagcgacccttcctggccatcctgggcggagctaaagttgcagacaagatccagctcatcaataatatgctggacaaagtcaatgagatgattattggtggtggaatggcttttaccttccttaaggtgctcaacaacatggagattggcacttctctgtttgatgaagagggagccaagattgtcaaagacctaatgtccaaagctgagaagaatggtgtgaagattaccttgcctgttgactttgtcactgctgacaagtttgatgagaatgccaagactggccaagccactgtggcttctggcatacctgctggctggatgggcttggactgtggtcctgaaagcagcaagaagtatgctgaggctgtcactcgggctaagcagattgtgtggaatggtcctgtgggggtatttgaatgggaagcttttgcccggggaaccaaagctctcatggatgaggtggtgaaagccacttctaggggctgcatcaccatcataggtggtggagacactgccacttgctgtgccaaatggaacacggaggataaagtcagccatgtgagcactgggggtggtgccagtttggagctcctggaaggtaaagtccttcctggggtggatgctctcagcaatatttagtactttcctgccttttagttcctgtgcacagcccctaagtcaacttagcattttctgcatctccacttggcattagctaaaaccttccatgtcaagattcagctagtggccaagagatgcagtgccaggaacccttaaacagttgcacagcatctcagctcatcttcactgcaccctggatttgcatacattcttcaagatcccatttgaattttttagtgactaaaccattgtgcattctagagtgcatatatttatattttgcctgttaaaaagaaagtgagcagtgttagcttagttctcttttgatgtaggttattatgattagctttgtcactgtttcactactcagcatggaaacaagatgaaattccatttgtaggtagtgagacaaaattgatgatccattaagtaaacaataaaagtgtccattgaaaccgtgatttttttttttttcctgtcatactttgttaggaagggtgagaatagaatcttgaggaacggatcagatgtctatattgctgaatgcaagaagtggggcagcagcagtggagagatgggacaattagataaatgtccattctttatcaagggcctactttatggcagacattgtgctagtgcttttattctaacttttatttttatcagttacacatgatcataatttaaaaagtcaaggcttataacaaaaaagccccagcccattcctcccattcaagattcccactccccagaggtgaccactttcaactcttgagtttttcaggtatatacctccatgtttctaagtaatatgcttatattgttcacttcttttttttttattttttaaagaaatctatttcataccatggaggaaggctctgttccacatatatttccacttcttcattctctcggtatagttttgtcacaattatagattagatcaaaagtctacataactaatacagctgagctatgtagtatgctatgattaaatttacttatgtaacttttattgtctttggcattaacagtgtttcaaaaaattttctgtgtatacccatcagtgattcattcccaaatcttctagaagcataagtgtctcaatatattaaaacatattgaataatccttgttagagttatccctgcaggagtccttagtgctcctttatccaatttgtacttgatgccctctaggcagggtgtacagctagctgttgctctggtatttcctataaccttcttggggatttcttttacctcctgtgttagactcctgttttctggattcccccttttccctctttcttggtctactttttgtagaacacaagactctactagcttcctgagaaagggtgcctgggaggcaaaatctctaagactttgtaagtctgaaaatgtctttattcgacccttatacttgattcctagtttggctatatatagaattttagcctgagtatcactttttgagactcgaagccactgtttcattgtcactattgagaatctaaatggccattcggattctttcatcatctttataattttaccttcctatttctttcctgtccttttaatggagttttgggagagagcagaggtaaacatgatttgaaaaagccatgtctgaccagaaattctgtgctggcaagatatgtatttcacctttagggacaaagaaataaacttttggacaggaccacagagctagtaagtaacagcagggattcaagtccaggtttgtctggttccagtggctgatgcttttccaatgtgcctccgtccctgacatgatgcttctaggctatagatgcttctagactctatccctgacatgatgcttctagactattttgtttaaccctggatagaatagcaaaagaaaattttggtggttgctctaaacaaaacagaaatttgaaagctcaagttttttcttcatttgtattttagttaatactgtacccatatttgtagttaattttaaattgtaccatgtttctgcatacctctatgggtactcaggaattctagtccaatttttgtgactttttcctactgattacctttcctccaacgttttaaaaattatttcaaatggaactgaaagaagcataaactcccataaacccagcacctagactctacaattgccaacattatctatccaacaatctctgactgtaccttttaagtactttctactggactgtttccaggatcacccctcatttatttgggttgttaacctaaagaatgaatgggggaatctccagtcataaacaacttgtcaattaggcaaatatttgagttccttctatgtgcttaaagacgtgatagagggaatataagagcatttatgttctgaaggaatttttaacctaaccaaagaagatagtagataacttgtgtgcatataagctagaacagtataaggggccgggcatggtggcttacgcctgtaatcccaggactttgggaggccaag

SEQ ID NO: 794 - DNA, 2364 bp, Homo sapiens
cagcggccgggaaggggcggtgcgggaggcggggtgtggggcggtagtgtgggccctgttcctgcccgcgcggtgttccgcattctgcaagcctccggagcgcacgtcggcagtcggctccctcgttgaccgaatcaccgacctctctccccagctgtatttccaaaatgtcgctttctaacaagctgacgctggacaagctggacgttaaagggaagcgggtcgttatgagagtcgacttcaatgttcctatgaagaacaaccagataacaaacaaccagaggattaaggctgctgtcccaagcatcaaattctgcttggacaatggagccaagtcggtagtccttatgagccacctaggccggcctgatggtgtgcccatgcctgacaagtactccttagagccagttgctgtagaactcaaatctctgctgggcaaggatgttctgttcttgaaggactgtgtaggcccagaagtggagaaagcctgtgccaacccagctgctgggtctgtcatcctgctggagaacctccgctttcatgtggaggaagaagggaagggaaaagatgcttctgggaacaaggttaaagccgagccagccaaaatagaagctttccgagcttcactttccaagctaggggatgtctatgtcaatgatgcttttggcactgctcacagagcccacagctccatggtaggagtcaatctgccacagaaggctggtgggtttttgatgaagaaggagctgaactactttgcaaaggccttggagagcccagagcgacccttcctggccatcctgggcggagctaaagttgcagacaagatccagctcatcaataatatgctggacaaagtcaatgagatgattattggtggtggaatggcttttaccttccttaaggtgctcaacaacatggagattggcacttctctgtttgatgaagagggagccaagattgtcaaagacctaatgtccaaagctgagaagaatggtgtgaagattaccttgcctgttgactttgtcactgctgacaagtttgatgagaatgccaagactggccaagccactgtggcttctggcatacctgctggctggatgggcttggactgtggtcctgaaagcagcaagaagtatgctgaggctgtcactcgggctaagcagattgtgtggaatggtcctgtgggggtatttgaatgggaagcttttgcccggggaaccaaagctctcatggatgaggtggtgaaagccacttctaggggctgcatcaccatcataggtggtggagacactgccacttgctgtgccaaatggaacacggaggataaagtcagccatgtgagcactgggggtggtgccagtttggagctcctggaagttcctgtgcacagcccctaagtcaacttagcattttctgcatctccacttggcattagctaaaaccttccatgtcaagattcagctagtggccaagagatgcagtgccaggaacccttaaacagttgcacagcatctcagctcatcttcactgcaccctggatttgcatacattcttcaagatcccatttgaattttttagtgactaaaccattgtgcattctagagtgcatatatttatattttgcctgttaaaaagaaagtgagcagtgttagcttagttctcttttgatgtaggttattatgattagctttgtcactgtttcactactcagcatggaaacaagatgaaattccatttgtaggtagtgagacaaaattgatgatccattaagtaaacaataaaagtgtccattgaaaccgtgatttttttttttttcctgtcatactttgttaggaagggtgagaatagaatcttgaggaacggatcagatgtctatattgctgaatgcaagaagtggggcagcagcagtggagagatgggacaattagataaatgtccattctttatcaagggcctactttatggcagacattgtgctagtgcttttattctaacttttatttttatcagttacacatgatcataatttaaaaagtcaaggcttataacaaaaaagccccagcccattcctcccattcaagattcccactccccagaggtgaccactttcaactcttgagtttttcaggtatatacctccatgtttctaagtaatatgcttatattgttcacttcttttttttttattttttaaagaaatctatttcataccatggaggaaggctctgttccacatatatttccacttcttcattctctcggtatagttttgtcacaattatagattagatcaaaagtctacataactaatacagctgagctatgtagtatgctatgattaaatttacttatgtaactttt

SEQ ID NO: 795 - DNA, 4021 bp, Homo sapiens
cagcggccgggaaggggcggtgcgggaggcggggtgtggggcggtagtgtgggccctgttcctgcccgcgcggtgttccgcattctgcaagcctccggagcgcacgtcggcagtcggctccctcgttgaccgaatcaccgacctctctccccagctgtatttccaaaatgtcgctttctaacaagctgacgctggacaagctggacgttaaagggaagcgggtcgttatgagagtcgacttcaatgttcctatgaagaacaaccagataacaaacaaccagaggattaaggctgctgtcccaagcatcaaattctgcttggacaatggagccaagtcggtagtccttatgagccacctaggccggcctgatggtgtgcccatgcctgacaagtactccttagagccagttgctgtagaactcaaatctctgctgggcaagtaagtgccaggctctggtgctggtagactttgtggcgggggaagttgtcaagcacgttgttactggtttttaactttcatactgctcaagtgtcttcatctcttcctcttctcagggatgttctgttcttgaaggactgtgtaggcccagaagtggagaaagcctgtgccaacccagctgctgggtctgtcatcctgctggagaacctccgctttcatgtggaggaagaagggaagggaaaagatgcttctgggaacaaggttaaagccgagccagccaaaatagaagctttccgagcttcactttccaagctaggggatgtctatgtcaatgatgcttttggcactgctcacagagcccacagctccatggtaggagtcaatctgccacagaaggctggtgggtttttgatgaagaaggagctgaactactttgcaaaggccttggagagcccagagcgacccttcctggccatcctgggcggagctaaagttgcagacaagatccagctcatcaataatatgctggacaaagtcaatgagatgattattggtggtggaatggcttttaccttccttaaggtgctcaacaacatggagattggcacttctctgtttgatgaagagggagccaagattgtcaaagacctaatgtccaaagctgagaagaatggtgtgaagattaccttgcctgttgactttgtcactgctgacaagtttgatgagaatgccaagactggccaagccactgtggcttctggcatacctgctggctggatgggcttggactgtggtcctgaaagcagcaagaagtatgctgaggctgtcactcgggctaagcagattgtgtggaatggtcctgtgggggtatttgaatgggaagcttttgcccggggaaccaaagctctcatggatgaggtggtgaaagccacttctaggggctgcatcaccatcataggtggtggagacactgccacttgctgtgccaaatggaacacggaggataaagtcagccatgtgagcactgggggtggtgccagtttggagctcctggaaggtaaagtccttcctggggtggatgctctcagcaatatttagtactttcctgccttttagttcctgtgcacagcccctaagtcaacttagcattttctgcatctccacttggcattagctaaaaccttccatgtcaagattcagctagtggccaagagatgcagtgccaggaacccttaaacagttgcacagcatctcagctcatcttcactgcaccctggatttgcatacattcttcaagatcccatttgaattttttagtgactaaaccattgtgcattctagagtgcatatatttatattttgcctgttaaaaagaaagtgagcagtgttagcttagttctcttttgatgtaggttattatgattagctttgtcactgtttcactactcagcatggaaacaagatgaaattccatttgtaggtagtgagacaaaattgatgatccattaagtaaacaataaaagtgtccattgaaaccgtgatttttttttttttcctgtcatactttgttaggaagggtgagaatagaatcttgaggaacggatcagatgtctatattgctgaatgcaagaagtggggcagcagcagtggagagatgggacaattagataaatgtccattctttatcaagggcctactttatggcagacattgtgctagtgcttttattctaacttttatttttatcagttacacatgatcataatttaaaaagtcaaggcttataacaaaaaagccccagcccattcctcccattcaagattcccactccccagaggtgaccactttcaactcttgagtttttcaggtatatacctccatgtttctaagtaatatgcttatattgttcacttcttttttttttattttttaaagaaatctatttcataccatggaggaaggctctgttccacatatatttccacttcttcattctctcggtatagttttgtcacaattatagattagatcaaaagtctacataactaatacagctgagctatgtagtatgctatgattaaatttacttatgtaacttttattgtctttggcattaacagtgtttcaaaaaattttctgtgtatacccatcagtgattcattcccaaatcttctagaagcataagtgtctcaatatattaaaacatattgaataatccttgttagagttatccctgcaggagtccttagtgctcctttatccaatttgtacttgatgccctctaggcagggtgtacagctagctgttgctctggtatttcctataaccttcttggggatttcttttacctcctgtgttagactcctgttttctggattcccccttttccctctttcttggtctactttttgtagaacacaagactctactagcttcctgagaaagggtgcctgggaggcaaaatctctaagactttgtaagtctgaaaatgtctttattcgacccttatacttgattcctagtttggctatatatagaattttagcctgagtatcactttttgagactcgaagccactgtttcattgtcactattgagaatctaaatggccattcggattctttcatcatctttataattttaccttcctatttctttcctgtccttttaatggagttttgggagagagcagaggtaaacatgatttgaaaaagccatgtctgaccagaaattctgtgctggcaagatatgtatttcacctttagggacaaagaaataaacttttggacaggaccacagagctagtaagtaacagcagggattcaagtccaggtttgtctggttccagtggctgatgcttttccaatgtgcctccgtccctgacatgatgcttctaggctatagatgcttctagactctatccctgacatgatgcttctagactattttgtttaaccctggatagaatagcaaaagaaaattttggtggttgctctaaacaaaacagaaatttgaaagctcaagttttttcttcatttgtattttagttaatactgtacccatatttgtagttaattttaaattgtaccatgtttctgcatacctctatgggtactcaggaattctagtccaatttttgtgactttttcctactgattacctttcctccaacgttttaaaaattatttcaaatggaactgaaagaagcataaactcccataaacccagcacctagactctacaattgccaacattatctatccaacaatctctgactgtaccttttaagtactttctactggactgtttccaggatcacccctcatttatttgggttgttaacctaaagaatgaatgggggaatctccagtcataaacaacttgtcaattaggcaaatatttgagttccttctatgtgcttaaagacgtgatagagggaatataagagcatttatgttctgaaggaatttttaacctaaccaaagaagatagtagataacttgtgtgcatataagctagaacagtataaggggccgggcatggtggcttacgcctgtaatcccaggactttgggaggccaag

SEQ ID NO: 796 - DNA, 1297 bp, Homo sapiens
gtgagagccaggcgtccctctgcctgcccactcagtggcaacacccgggagctgttttgtcctttgtggagcctcagcagttccctctttcagaactcactgccaagagccctgaacaggagccaccatgcagtgcttcagcttcattaagaccatgatgatcctcttcaatttgctcatctttctgtgtggtgcagccctgttggcagtgggcatctgggtgtcaatcgatggggcatcctttctgaagatcttcgggccactgtcgtccagtgccatgcagtttgtcaacgtgggctacttcctcatcgcagccggcgttgtggtctttgctcttggtttcctgggctgctatggtgctaagactgagagcaagtgtgccctcgtgacgttcttcttcatcctcctcctcatcttcattgctgaggttgcagctgctgtggtcgccttggtgtacaccacaatggctgagcacttcctgacgttgctggtagtgcctgccatcaagaaagattatggttcccaggaagacttcactcaagtgtggaacaccaccatgaaagggctcaagtgctgtggcttcaccaactatacggattttgaggactcaccctacttcaaagagaacagtgcctttcccccattctgttgcaatgacaacgtcaccaacacagccaatgaaacctgcaccaagcaaaaggctcacgaccaaaaagtagagggttgcttcaatcagcttttgtatgacatccgaactaatgcagtcaccgtgggtggtgtggcagctggaattgggggcctcgagctggctgccatgattgtgtccatgtatctgtactgcaatctacaataagtccacttctgcctctgccactactgctgccacatgggaactgtgaagaggcaccctggcaagcagcagtgattgggggaggggacaggatctaacaatgtcacttgggccagaatggacctgccctttctgctccagacttggggctagatagggaccactccttttaggcgatgcctgactttccttccattggtgggtggatgggtggggggcattccagagcctctaaggtagccagttctgttgcccattcccccagtctattaaacccttgatatgccccctaggcctagtggtgatcccagtgctctactgggggatgagagaaaggcattttatagcctgggcataagtgaaatcagcagagcctctgggtggatgtgtagaaggcacttcaaaatgcataaacctgttacaatgttaaaaaaaaaaaaaaaaaaa

SEQ ID NO: 797 - DNA, 1532 bp, Homo sapiens
gtggagggcacgcagacattctgggaagccacttgccccacccctgggctgcttcttcttgagatcaggaggggcgttgcccagggctggtgttgccaggtggaggcctgctgaggcagtggttgtggggatcggtctccaggcagcagggggcagcagggtcaaggagaggctaactggccacgggtggggccagcaggcgggcagaaggaggctttaaagcgcctaccctgcctgcaggtgagcagtggtgtgtgagagccaggcgtccctctgcctgcccactcagtggcaacacccgggagctgttttgtcctttgtggagcctcagcagttccctctttcagaactcactgccaagagccctgaacaggagccaccatgcagtgcttcagcttcattaagaccatgatgatcctcttcaatttgctcatctttctgtgtggtgcagccctgttggcagtgggcatctgggtgtcaatcgatggggcatcctttctgaagatcttcgggccactgtcgtccagtgccatgcagtttgtcaacgtgggctacttcctcatcgcagccggcgttgtggtctttgctcttggtttcctgggctgctatggtgctaagactgagagcaagtgtgccctcgtgacgttcttcttcatcctcctcctcatcttcattgctgaggttgcagctgctgtggtcgccttggtgtacaccacaatggctgagcacttcctgacgttgctggtagtgcctgccatcaagaaagattatggttcccaggaagacttcactcaagtgtggaacaccaccatgaaagggctcaagtgctgtggcttcaccaactatacggattttgaggactcaccctacttcaaagagaacagtgcctttcccccattctgttgcaatgacaacgtcaccaacacagccaatgaaacctgcaccaagcaaaaggctcacgaccaaaaagtagagggttgcttcaatcagcttttgtatgacatccgaactaatgcagtcaccgtgggtggtgtggcagctggaattgggggcctcgagctggctgccatgattgtgtccatgtatctgtactgcaatctacaataagtccacttctgcctctgccactactgctgccacatgggaactgtgaagaggcaccctggcaagcagcagtgattgggggaggggacaggatctaacaatgtcacttgggccagaatggacctgccctttctgctccagacttggggctagatagggaccactccttttaggcgatgcctgactttccttccattggtgggtggatgggtggggggcattccagagcctctaaggtagccagttctgttgcccattcccccagtctattaaacccttgatatgccccctaggcctagtggtgatcccagtgctctactgggggatgagagaaaggcattttatagcctgggcataagtgaaatcagcagagcctctgggtggatgtgtagaaggcacttcaaaatgcataaacctgttacaatgtt

SEQ ID NO: 798 - DNA, 1292 bp, Homo sapiens
gtgagcagtggtgtgtgagagccaggcgtccctctgcctgcccactcagtggcaacacccgggagctgttttgtcctttgtggagcctcagcagttccctctttcagaactcactgccaagagccctgaacaggagccaccatgcagtgcttcagcttcattaagaccatgatgatcctcttcaatttgctcatctttctgtgtggtgcagccctgttggcagtgggcatctgggtgtcaatcgatggggcatcctttctgaagatcttcgggccactgtcgtccagtgccatgcagtttgtcaacgtgggctacttcctcatcgcagccggcgttgtggtctttgctcttggtttcctgggctgctatggtgctaagactgagagcaagtgtgccctcgtgacgttcttcttcatcctcctcctcatcttcattgctgaggttgcagctgctgtggtcgccttggtgtacaccacaatggctgagcacttcctgacgttgctggtagtgcctgccatcaagaaagattatggttcccaggaagacttcactcaagtgtggaacaccaccatgaaagggctcaagtgctgtggcttcaccaactatacggattttgaggactcaccctacttcaaagagaacagtgcctttcccccattctgttgcaatgacaacgtcaccaacacagccaatgaaacctgcaccaagcaaaaggctcacgaccaaaaagtagagggttgcttcaatcagcttttgtatgacatccgaactaatgcagtcaccgtgggtggtgtggcagctggaattgggggcctcgagctggctgccatgattgtgtccatgtatctgtactgcaatctacaataagtccacttctgcctctgccactactgctgccacatgggaactgtgaagaggcaccctggcaagcagcagtgattgggggaggggacaggatctaacaatgtcacttgggccagaatggacctgccctttctgctccagacttggggctagatagggaccactccttttaggcgatgcctgactttccttccattggtgggtggatgggtggggggcattccagagcctctaaggtagccagttctgttgcccattcccccagtctattaaacccttgatatgccccctaggcctagtggtgatcccagtgctctactgggggatgagagaaaggcattttatagcctgggcataagtgaaatcagcagagcctctgggtggatgtgtagaaggcacttcaaaatgcataaacctgttacaatgtt

SEQ ID NO: 799 - DNA, 1273 bp, Homo sapiens
tcccggcctcagacacacacaccagcagctacacctacacgctgaccatcacaggcacacagaggcacatccacctcacatccacctcatacttgtgtactctcagggttcagtctttcatcctatccctctctgatctgtgcctcccaataccttccaagatgtttacagagacccttctccctgtgcagttaggagtgtaaggcaagagagcccctacttcatggggcagatcaagagctgagaccaaagatggtctatgttgctgaccttgtcctgtcctcctgctgtcttaaactatgatccctgctgcggtcactgaagcctttccctgtgagcagtggtgtgtgagagccaggcgtccctctgcctgcccactcagtggcaacacccgggagctgttttgtcctttgtggagcctcagcagttccctctttcagaactcactgccaagagccctgaacaggagccaccatgcagtgcttcagcttcattaagaccatgatgatcctcttcaatttgctcatctttctgtgtggtgcagccctgttggcagtgggcatctgggtgtcaatcgatggggcatcctttctgaagatcttcgggccactgtcgtccagtgccatgcagtttgtcaacgtgggctacttcctcatcgcagccggcgttgtggtctttgctcttggtttcctgggctgctatggtgctaagactgagagcaagtgtgccctcgtgacgttcttcttcatcctcctcctcatcttcattgctgaggttgcagctgctgtggtcgccttggtgtacaccacaatggctgagcacttcctgacgttgctggtagtgcctgccatcaagaaagattatggttcccaggaagacttcactcaagtgtggaacaccaccatgaaagggctcaagtgctgtggcttcaccaactatacggattttgaggactcaccctacttcaaagagaacagtgcctttcccccattctgttgcaatgacaacgtcaccaacacagccaatgaaacctgcaccaagcaaaaggctcacgaccaaaaagtagagggttgcttcaatcagcttttgtatgacatccgaactaatgcagtcaccgtgggtggtgtggcagctggaattgggggcctcgagctggctgccatgattgtgtccatgtatctgtactgcaatctacaataatgaaatcagcagagcctctgggtggatgtgtagaaggcacttcaaaatgcataaacctgttacaatgttgcca

SEQ ID NO: 800 - DNA, 1625 bp, Homo sapiens
tcccggcctcagacacacacaccagcagctacacctacacgctgaccatcacaggcacacagaggcacatccacctcacatccacctcatacttgtgtactctcagggttcagtctttcatcctatccctctctgatctgtgcctcccaataccttccaagatgtttacagagacccttctccctgtgcagttaggagtgtaaggcaagagagcccctacttcatggggcagatcaagagctgagaccaaagatggtctatgttgctgaccttgtcctgtcctcctgctgtcttaaactatgatccctgctgcggtcactgaagcctttccctgtgagcagtggtgtgtgagagccaggcgtccctctgcctgcccactcagtggcaacacccgggagctgttttgtcctttgtggagcctcagcagttccctctttcagaactcactgccaagagccctgaacaggagccaccatgcagtgcttcagcttcattaagaccatgatgatcctcttcaatttgctcatctttctgtgtggtgcagccctgttggcagtgggcatctgggtgtcaatcgatggggcatcctttctgaagatcttcgggccactgtcgtccagtgccatgcagtttgtcaacgtgggctacttcctcatcgcagccggcgttgtggtctttgctcttggtttcctgggctgctatggtgctaagactgagagcaagtgtgccctcgtgacgttcttcttcatcctcctcctcatcttcattgctgaggttgcagctgctgtggtcgccttggtgtacaccacaatggctgagcacttcctgacgttgctggtagtgcctgccatcaagaaagattatggttcccaggaagacttcactcaagtgtggaacaccaccatgaaagggctcaagtgctgtggcttcaccaactatacggattttgaggactcaccctacttcaaagagaacagtgcctttcccccattctgttgcaatgacaacgtcaccaacacagccaatgaaacctgcaccaagcaaaaggctcacgaccaaaaagtagagggttgcttcaatcagcttttgtatgacatccgaactaatgcagtcaccgtgggtggtgtggcagctggaattgggggcctcgagctggctgccatgattgtgtccatgtatctgtactgcaatctacaataagtccacttctgcctctgccactactgctgccacatgggaactgtgaagaggcaccctggcaagcagcagtgattgggggaggggacaggatctaacaatgtcacttgggccagaatggacctgccctttctgctccagacttggggctagatagggaccactccttttaggcgatgcctgactttccttccattggtgggtggatgggtggggggcattccagagcctctaaggtagccagttctgttgcccattcccccagtctattaaacccttgatatgccccctaggcctagtggtgatcccagtgctctactgggggatgagagaaaggcattttatagcctgggcataagtgaaatcagcagagcctctgggtggatgtgtagaaggcacttcaaaatgcataaacctgttacaatgtt

SEQ ID NO: 801 - DNA, 1465 bp, Homo sapiens
gctacacctacacgctgaccatcacaggcacacagaggcacatccacctcacatccacctcatacttgtgtactctcagggttcagtctttcatcctatccctctctgatctgtgcctcccaataccttccaagatgtttacagagacccttctccctgtgcagttaggagtgtaaggcaagagagcccctacttcatggggcagatcaagagctgagaccaaagatggtctatgttgctgaccttgtcctgtcctcctgctgtcttaaactatgatccctgctgcggtcactgaagcctttccctgagccaccatgcagtgcttcagcttcattaagaccatgatgatcctcttcaatttgctcatctttctgtgtggtgcagccctgttggcagtgggcatctgggtgtcaatcgatggggcatcctttctgaagatcttcgggccactgtcgtccagtgccatgcagtttgtcaacgtgggctacttcctcatcgcagccggcgttgtggtctttgctcttggtttcctgggctgctatggtgctaagactgagagcaagtgtgccctcgtgacgttcttcttcatcctcctcctcatcttcattgctgaggttgcagctgctgtggtcgccttggtgtacaccacaatggctgagcacttcctgacgttgctggtagtgcctgccatcaagaaagattatggttcccaggaagacttcactcaagtgtggaacaccaccatgaaagggctcaagtgctgtggcttcaccaactatacggattttgaggactcaccctacttcaaagagaacagtgcctttcccccattctgttgcaatgacaacgtcaccaacacagccaatgaaacctgcaccaagcaaaaggctcacgaccaaaaagtagagggttgcttcaatcagcttttgtatgacatccgaactaatgcagtcaccgtgggtggtgtggcagctggaattgggggcctcgagctggctgccatgattgtgtccatgtatctgtactgcaatctacaataagtccacttctgcctctgccactactgctgccacatgggaactgtgaagaggcaccctggcaagcagcagtgattgggggaggggacaggatctaacaatgtcacttgggccagaatggacctgccctttctgctccagacttggggctagatagggaccactccttttaggcgatgcctgactttccttccattggtgggtggatgggtggggggcattccagagcctctaaggtagccagttctgttgcccattcccccagtctattaaacccttgatatgccccctaggcctagtggtgatcccagtgctctactgggggatgagagaaaggcattttatagcctgggcataagtgaaatcagcagagcctctgggtggatgtgtagaaggcacttcaaaatgcataaacctgttacaatgtt

SEQ ID NO: 802 - DNA, 2749 bp, Homo sapiens
cttcccccacccgcttccggccgcggctcggttctcccgcctccgcctccgccgcggctcgtggttgtcccgccatggcactgtcgcgggggctgccccgggagctggctgaggcggtggccgggggccgggtgctggtggtgggggcgggcggcatcggctgcgagctcctcaagaatctcgtgctcaccggtttctcccacatcgacctgattgatctggatactattgatgtaagcaacctcaacagacagtttttgtttcaaaagaaacatgttggaagatcaaaggcacaggttgccaaggaaagtgtactgcagttttacccgaaagctaatatcgttgcctaccatgacagcatcatgaaccctgactataatgtggaatttttccgacagtttatactggttatgaatgctttagataacagagctgcccgaaaccatgttaatagaatgtgcctggcagctgatgttcctcttattgaaagtggaacagctgggtatcttggacaagtaactactatcaaaaagggtgtgaccgagtgttatgagtgtcatcctaagccgacccagagaacctttcctggctgtacaattcgtaacacaccttcagaacctatacattgcatcgtttgggcaaagtacttgttcaaccagttgtttggggaagaagatgctgatcaagaagtatctcctgacagagctgaccctgaagctgcctgggaaccaacggaagccgaagccagagctagagcatctaatgaagatggtgacattaaacgtatttctactaaggaatgggctaaatcaactggatatgatccagttaaactttttaccaagctttttaaagatgacatcaggtatctgttgacaatggacaaactatggcggaaaaggaaacctccagttccgttggactgggctgaagtacaaagtcaaggagaagaaacgaatgcatcagatcaacagaatgaaccccagttaggcctgaaagaccagcaggttctagatgtaaagagctatgcacgtcttttttcaaagagcatcgagactttgagagttcatttagcagaaaagggggatggagctgagctcatatgggataaggatgacccatctgcaatggattttgtcacctctgctgcaaacctcaggatgcatattttcagtatgaatatgaagagtagatttgatatcaaatcaatggcagggaacattattcctgctattgctactactaatgcagtaattgctgggttgatagtattggaaggattgaagattttatcaggaaaaatagaccagtgcagaacaatttttttgaataaacaaccaaacccaagaaagaagcttcttgtgccttgtgcactggatcctcccaaccccaattgttatgtatgtgccagcaagccagaggtgactgtgcggctgaatgtccataaagtgactgttctcaccttacaagacaagatagtgaaagaaaaatttgctatggtagcaccagatgtccaaattgaagatgggaaaggaacaatcctaatatcttccgaagagggagagacggaagctaataatcacaagaagttgtcagaatttggaattagaaatggcagccggcttcaagcagatgacttcctccaggactatactttattgatcaacatccttcatagtgaagacctaggaaaggacgttgaatttgaagttgttggtgatgccccggaaaaagtggggcccaaacaagctgaagatgctgccaaaagcataaccaatggcagtgatgatggagctcagccctccacctccacagctcaagagcaagatgacgttctcatagttgattcggatgaagaagattcttcaaataatgccgacgtcagtgaagaagagagaagccgcaagaggaaattagatgagaaagagaatctcagtgcaaagaggtcacgtatagaacagaaggaagagcttgatgatgtcatagcattagattgaacagaaatgcctctaaacagaaccctcttactatttagtttatctgggcagaaccagattgttatgtcctttgttccaaagggaaaaaattgacagcagtgacttgaaaatgattctgctccctttgaaagcattcattttgctagaactgttagacacattgcagtatgctgtattgaaagtaggaatatagttttaaaaaccctttgaacaaagtgtgtgcataaccagtcatgagataaaacaacacaatgcatgttgcctttttaatgtaaatacccgtaggtatcattaatagtttcaaaatattgtggtttagtaaagttgatacctggttataaatattatgcctttatttttggctagaagaagaattatttttagcctagatctaaccattttcatactcttaactgattgaaacagattcaaagaagtatcgagtgctatgcattgaaacttgtttttaaatgttagatggcactatgtatattaatgtaaaacaatgttaatttactcaagttttcagtttgtaccgcctggtatgtctgtgtaagaagccaatttttgtgtattgttacagtttcaggttatttatattcgatgttttgtaaaactcaaataacgactatacttatggaccaaataaatggcatctgcattcttgttacacatgcctgcacagttcctgtttctgctgccttatatctactgcaggaatgtcaaattcttttcattaaaaaaagaactcg

SEQ ID NO: 803 - DNA, 1923 bp, Homo sapiens
atggcactgtcgcgggggctgccccgggagctggctgaggcggtggccgggggccgggtgctggtggtgggggcgggcggcatcggctgcgagctcctcaagaatctcgtgctcaccggtttctcccacatcgacctgattgatctggatactattgatgtaagcaacctcaacagacagtttttgtttcaaaagaaacatgttggaagatcaaaggcacaggttgccaaggaaagtgtactgcagttttacccgaaagctaatatcgttgcctaccatgacagcatcatgaaccctgactataatgtggaatttttccgacagtttatactggttatgaatgctttagataacagagctgcccgaaaccatgttaatagaatgtgcctggcagctgatgttcctcttattgaaagtggaacagctgggtatcttggacaagtaactactatcaaaaagggtgtgaccgagtgttatgagtgtcatcctaagccgacccagagaacctttcctggctgtacaattcgtaacacaccttcagaacctatacattgcatcgtttgggcaaagtacttgttcaaccagttgtttggggaagaagatgctgatcaagaagtatctcctgacagagctgaccctgaagctgcctgggaaccaacggaagccgaagccagagctagagcatctaatgaagatggtgacattaaacgtatttctactaaggaatgggctaaatcaactggatatgatccagttaaactttttaccaagctttttaaagatgacatcaggtatctgttgacaatggacaaactatggcggaaaaggaaacctccagttccgttggactgggctgaagtacaaagtcaaggagaagaaacgaatgcatcagatcaacagaatgaaccccagttaggcctgaaagaccagcaggttctagatgtaaagagctatgcacgtcttttttcaaagagcatcgagactttgagagttcatttagcagaaaagggggatggagctgagctcatatgggataaggatgacccatctgcaatggattttgtcacctctgctgcaaacctcaggatgcatattttcagtatgaatatgaagagtagatttgatatcaaatcaatggcagggaacattattcctgctattgctactactaatgcagtaattgctgggttgatagtattggaaggattgaagattttatcaggaaaaatagaccagtgcagaacaatttttttgaataaacaaccaaacccaagaaagaagcttcttgtgccttgtgcactggatcctcccaaccccaattgttatgtatgtgccagcaagccagaggtgactgtgcggctgaatgtccataaagtgactgttctcaccttacaagacaagatagtgaaagaaaaatttgctatggtagcaccagatgtccaaattgaagatgggaaaggaacaatcctaatatcttccgaagagggagagacggaagctaataatcacaagaagttgtcagaatttggaattagaaatggcagccggcttcaagcagatgacttcctccaggactatactttattgatcaacatccttcatagtgaagacctaggaaaggacgttgaatttgaagttgttggtgatgccccggaaaaagtggggcccaaacaagctgaagatgctgccaaaagcataaccaatggcagtgatgatggagctcagccctccacctccacagctcaagagcaagatgacgttctcatagttgattcggatgaagaagattcttcaaataatgccgacgtcagtgaagaagagagaagccgcaagaggaaattagatgagaaagagaatctcagtgcaaagaggtcacgtatagaacagaaggaagagcttgatgatgtcatagcattagattga

SEQ ID NO: 804 - DNA, 3222 bp, Homo sapiens
cttcccccacccgcttccggccgcggctcggttctcccgcctccgcctccgccgcggctcgtggttgtcccgccatggcactgtcgcgggggctgccccgggagctggctgaggcggtggccgggggccgggtgctggtggtgggggcgggcggcatcggctgcgagctcctcaagaatctcgtgctcaccggtttctcccacatcgacctgattgatctggatactattgatgtaagcaacctcaacagacagtttttgtttcaaaagaaacatgttggaagatcaaaggcacaggttgccaaggaaagtgtactgcagttttacccgaaagctaatatcgttgcctaccatgacagcatcatgaaccctgactataatgtggaatttttccgacagtttatactggttatgaatgctttagataacagagctgcccgaaaccatgttaatagaatgtgcctggcagctgatgttcctcttattgaaagtggaacagctgggtatcttggacaagtaactactatcaaaaagggtgtgaccgagtgttatgagtgtcatcctaagccgacccagagaacctttcctggctgtacaattcgtaacacaccttcagaacctatacattgcatcgtttgggcaaagtacttgttcaaccagttgtttggggaagaagatgctgatcaagaagtatctcctgacagagctgaccctgaagctgcctgggaaccaacggaagccgaagccagagctagagcatctaatgaagatggtgacattaaacgtatttctactaaggaatgggctaaatcaactggatatgatccagttaaactttttaccaagctttttaaagatgacatcaggtatctgttgacaatggacaaactatggcggaaaaggaaacctccagttccgttggactgggctgaagtacaaagtcaaggagaagaaacgaatgcatcagatcaacagaatgaaccccagttaggcctgaaagaccagcaggttctagatgtaaagagctatgcacgtcttttttcaaagagcatcgagactttgagagttcatttagcagaaaagggggatggagctgagctcatatgggataaggatgacccatctgcaatggattttgtcacctctgctgcaaacctcaggatgcatattttcagtatgaatatgaagagtagatttgatatcaaatcaatggcagggaacattattcctgctattgctactactaatgcagtaattgctgggttgatagtattggaaggattgaagattttatcaggaaaaatagaccagtgcagaacaatttttttgaataaacaaccaaacccaagaaagaagcttcttgtgccttgtgcactggatcctcccaaccccaattgttatgtatgtgccagcaagccagaggtgactgtgcggctgaatgtccataaagtgactgttctcaccttacaagacaagatagtgaaagaaaaatttgctatggtagcaccagatgtccaaattgaagatgggaaaggaacaatcctaatatcttccgaagagggagagacggaagctaataatcacaagaagttgtcagaatttggaattagaaatggcagccggcttcaagcagatgacttcctccaggactatactttattgatcaacatccttcatagtgaagacctaggaaaggacgttgaatttgaagttgttggtgatgccccggaaaaagtggggcccaaacaagctgaagatgctgccaaaagcataaccaatggcagtgatgatggagctcagccctccacctccacagctcaagagcaagatgacgttctcatagttgattcggatgaagaagattcttcaaataatgccgacgtcagtgaagaagagagaagccgcaagaggaaattagatgagaaagagaatctcagtgcaaagaggtcacgtatagaacagaaggaagagcttgatgatgtcatagcattagattgaacagaaatgcctctaaacagaaccctcttactatttagtttatctgggcagaaccagattgttatgtcctttgttccaaagggaaaaaattgacagcagtgacttgaaaatgattctgctccctttgaaagcattcattttgctagaactgttagacacattgcagtatgctgtattgaaagtaggaatatagttttaaaaaccctttgaacaaagtgtgtgcataaccagtcatgagataaaacaacacaatgcatgttgcctttttaatgtaaatacccgtaggtatcattaatagtttcaaaatattgtggtttagtaaagttgatacctggttataaatattatgcctttatttttggctagaagaagaattatttttagcctagatctaaccattttcatactcttaactgattgaaacagattcaaagaagtatcgagtgctatgcattgaaacttgtttttaaatgttagatggcactatgtatattaatgtaaaacaatgttaatttactcaagttttcagtttgtaccgcctggtatgtctgtgtaagaagccaatttttgtgtattgttacagtttcaggttatttatattcgatgttttgtaaaactcaaataacgactatacttatggaccaaataaatggcatctgcattcttgttacacatgcctgcacagttcctgtttctgctgccttatatctactgcaggaatgtcaaattcttttcattaaaaaaagaactcgcctcccaaagtgctgggattacaggcgtgagccactgcgcctggcctaatggcagtgtttttaaaatttggattgtcagcagttggcctttgttgagaaaatgtgtgactttgcccaagcccagtaacttggagccttgaatttgagatgctggaaagggagtccttcctcctttctgcagtgtttgtctgggttgtcccctagtttaccaaagtccattttgaatgtaccatccccagcccaactccagcctacagatagtgccagaccgccagtaggtggagtagcactgtcttcctggtcccggacctcagagggctttgcctgttagggtactcttatcactcagagatgggccttgagttttcagagaacagaaagccattaagctgtttcccctattgtattcatgtgccctttgtgtttctggcaataatttattttatatttcaactaaattttaaatttctaat

SEQ ID NO: 805 - DNA, 4785 bp, Homo sapiens
gggactggagctgctgccgcggcgacgccggggatctttgtcgctagctcccggcccttctgccccgccgccttccctcagtcagccggcgcgggaggccgtgcggcacctgtggaatcctctcaagaggaacagtcattgtgtgaaggttcaaattcagctgttagcatggaactttcagaacctattgtagaaaatggagagacagaaatgtctccagaagaatcatgggagcacaaagaagaaataagtgaagcagagccagggggtggttccttgggagatggaaggccgccagaggaaagtgcccatgaaatgatggaggaggaagaggaaatcccaaaacctaagtctgtggttgcaccgccaggtgctcctaagaaagagcatgtaaatgtagtattcattgggcacgtagatgctggcaagtcaaccattggaggacaaataatgtatttgactggaatggttgacaaaaggacgcttgaaaagtatgaaagagaagctaaagagaaaaacagagaaacttggtacttgtcttgggccttagacacaaatcaggaagaacgagacaagggtaaaacagtagaagtgggtcgtgcctattttgaaaccgaaaagaagcatttcacaattctagatgcccctggccacaagagttttgtcccaaatatgattggtggtgcctctcaagctgatttggctgtgctggtaatctcagccaggaaaggagagtttgaaactggatttgaaaaaggaggacagacaagagaacatgcaatgttggcaaagacagcaggtgtaaaacacctaattgtgctaattaataagatggatgatccaacagtaaattggagcaatgagagatatgaagaatgtaaggagaaactagtgccatttttgaaaaaagttggcttcaatcccaaaaaggacattcactttatgccctgctcaggacttactggagcaaatctcaaagagcagtcggatttctgtccttggtacattggattaccgtttattccatatctggataatttgccgaacttcaatagatcagttgatggaccaatcaggctgccaattgtggataagtacaaggatatgggcactgtggtcctgggaaagctggaatcaggatctatttgtaaaggccagcagcttgtgatgatgccaaacaagcacaacgtggaagttcttggaatactttccgatgatgtagagactgataccgtagccccaggtgaaaacctcaaaatcagactgaaaggaattgaagaagaggagattcttccagggtttatactttgtgatcctaataatctttgtcattctggacgcacatttgatgcccagatagtgattatagagcacaaatccatcatctgcccaggctataatgcggtgctgcatattcatacctgtattgaggaggtggaaataacagccttaatctgcttggtagacaaaaaatcaggagaaaaaagtaagacccgaccccgttttgtcaaacaagatcaagtatgcattgctcgcttaaggacagcaggaaccatctgccttgagacctttaaagacttccctcagatgggtcgtttcaccttaagagatgagggtaagaccattgcaattggaaaagttctgaaactggttccagagaaagactaagcattttcttgatgaccctgcacaatactgtgaggaaaattgactgcagaagcctacttcacaccgccttctcttattttctgcccattgataaacctctccccatattttgcaaagaggaaattcacagcaaaagtccacattatgtcagctttctcatattgagagctctgctatgccactgttgaatttttcccaagattcctgtccctagccctcacttcaaactctgcttccttggacagatttggcaatagctttgtaagtgatgtggacataattgcctacaataatgaaaacctacaggaatttttttatttttcattttccccttaggcatatttagtatttttcccccaggcagatcattctgagtgtgcgagtgtgtgtgcacatgttacaaaggcaactaccatgttaataaaatattcaatttgaaatccttttcggtatttgaattgcttttgaataatgttttttatctggatgtaacattgttgcattagctttttaactttcccaagtaattgaatacattttattacttggacttttataaactctttccctacccactataaatgagacattcacagcgttcaagtttgtattaaaggaaaggattagtttgaccccttcttttgatggttaatgcatacatgcagttaaatccctttatgcaaatgtgacactgctttactaggtcttttagttatttatttattttttttttttttgccaatttatattgtaacatgatttcttgaacacagtaagttgttttaaaataaaagaacagcatactgtagtttttataagtaaagcgtaatgaaattgtacccctagagaaaattccattaacttgttaaattagtggaattaacaacaaataaagcatgtttgagacctggcaaaaattcctctggtagtatttataaatagagctgcatgcctctagtatgaaaaccgtatcagttgcaagtgccacttctacaagttactcagtttactctttgtatcagtaactttaaaggttggatgatccttgctggttaaagctaaatctcaacctagcaactaaatgaaaatatttagaatcatcagaatctgaacagactaaaattatcagcgataagcagaatcaagcagggtataagttttatctcaattatttgaaattgactgagttttcttaagtgtaaagctgaaatttgctaaccatgtttttgatgaaccacagtgcagcattgtgtgggttttagattgaatgactctctgctataattatcatgactttgaaatttttcatgagaataaatgaggaatggaggcaatttgtgggtttatccaaagcccccttgatgttgagtgttgccattgatcaaagatagcctcttttagattgtgatttctctctaaataagatactttgtatatttaatgacaagtctcttccctataattttgctcctcagaaaagaaaagcctagacagactgtatttccagtcacagaacataaaacttaatctaatgggtgttttgttttgttttgagacagaggctcactctgtcacctaggctggagtgcagtggctcgatctcagctcactgcagcctccacctcccggattcaagcaatttcctgcctcagcctcttgagtagctgggattacaggagccctccacgaggcccagttaatttttgtatctttagtggagacgaggtttccccctattggtcaggctggtctcaaacttctgacctcaagtgatccactcgcctcagcctctcaaaagtgctgggattacaggcatgaggcgccgcacttggcctagtgttttcttaactgtgaaattcccattcatttcttgaatgaggctacatcttatggacagagcaaagttattgtcctacagattcttaaaactataattatggctattgcatgaaatttaaatagattttattatgtctgcaaatctctgggcttttatttttctggaaaatataggagctttaatcaaaacataatagttctttttgtaattccatgttaataaaaacaaatactagcaattgcttgaattttaatgaatatttaaaagttcaagagccacggaaatcacttccagagataagagttccctttctaaatagaacacatttttaaaaaataagttatgtttgctactaaaacatttacactgttagactattatgtgcatgttgccaagactcttaagtaacttggatatcaactgtgaagggcctacctctaaaaagtaacaggtcatacaaatacaaatgtaactgtaaaaattccactggattcttgcatatttgcaagattagattattcaaaagaaatttcagtgctaaaattaaccagcaacataagttctatgggctttgaaaattgttctcatctttttaaagttgatgcattttcaatcctgcttacacaggctgttcatttggataagtaaataaaatgtctaaggtgaacttggcattatgtggagatgttggaccgttatagagcaatacaaattcctatgctgtcattctgttttctgcaaatgcaaacgtgcttatatggtcaacagtgcaaaaatagggtagttggctgcatatttagggtattacctaagcatttgttctctaacgttgctctactagaatgatttttttcttgcatcttttcacattaatgatgttctttatataactttcatgcgattatttagttttttaaattaataaagtgaatttaagaaatattgaaataaacatctaagtaattgccattttaaacccttgtttcttactgtgggagagggggaaatacagcactcatttcttgtattgtcttgagattaagtgacaaatagtaaagtgttactgagtaattaagcccatgtattttttttttgtgagttgaaaatctttgaaatatgtgataaccgaatgtcaaaagttcctaaactctaacagtgcaggttgttcactgtaacgaggtaactcatatttgctggttacataaactacaagtactgctctcacaatatgggactttgaactgtgatgtagttcaacagttgccggcatcctctca

SEQ ID NO: 806 - DNA, 7216 bp, Homo sapiens
ggcggcgaggggtcaatccgcgccgggggtggggttggctgtgaggccgtcggaggtggttgggtgggaggagatccgctcacacacacgaggaggagggttgagctgctgccgccgccgcctctgtcgtcgtcgcgagtgtggagtcgggactggagctgctgccgcggcgacgccggggatctttgtcgctagctcccggcccttctgccccgccgccttccctcagtcagcgttgcccactcctctccggccgggcgcccctgcctccatttctcgctctctgtccaccacacacacggcccccccgatcatggatccgggcagtggcggcggcggcggcggcggcggcggcggcgggagcagcagcggcagcagcagcagcgactcggcgcctgactgctgggaccaggcggacatggaagcccccgggccgggcccttgcggcggcggcggctccctggcggcggcggccgaggcccagcgggagaacctcagcgcggccttcagccggcaactcaacgtcaacgccaagcccttcgtgcccaacgtccacgccgccgagttcgtgccgtccttcctgcggggcccggcagcgccgccacccccagctggcggcgccgccaataaccacggagccggcagcggcgcgggaggccgtgcggcacctgtggaatcctctcaagaggaacagtcattgtgtgaaggttcaaattcagctgttagcatggaactttcagaacctattgtagaaaatggagagacagaaatgtctccagaagaatcatgggagcacaaagaagaaataagtgaagcagagccagggggtggttccttgggagatggaaggccgccagaggaaagtgcccatgaaatgatggaggaggaagaggaaatcccaaaacctaagtctgtggttgcaccgccaggtgctcctaagaaagagcatgtaaatgtagtattcattgggcacgtagatgctggcaagtcaaccattggaggacaaataatgtatttgactggaatggttgacaaaaggacgcttgaaaagtatgaaagagaagctaaagagaaaaacagagaaacttggtacttgtcttgggccttagacacaaatcaggaagaacgagacaagggtaaaacagtagaagtgggtcgtgcctattttgaaaccgaaaagaagcatttcacaattctagatgcccctggccacaagagttttgtcccaaatatgattggtggtgcctctcaagctgatttggctgtgctggtaatctcagccaggaaaggagagtttgaaactggatttgaaaaaggaggacagacaagagaacatgcaatgttggcaaagacagcaggtgtaaaacacctaattgtgctaattaataagatggatgatccaacagtaaattggagcaatgagagatatgaagaatgtaaggagaaactagtgccatttttgaaaaaagttggcttcaatcccaaaaaggacattcactttatgccctgctcaggacttactggagcaaatctcaaagagcagtcggatttctgtccttggtacattggattaccgtttattccatatctggataatttgccgaacttcaatagatcagttgatggaccaatcaggctgccaattgtggataagtacaaggatatgggcactgtggtcctgggaaagctggaatcaggatctatttgtaaaggccagcagcttgtgatgatgccaaacaagcacaacgtggaagttcttggaatactttccgatgatgtagagactgataccgtagccccaggtgaaaacctcaaaatcagactgaaaggaattgaagaagaggagattcttccagggtttatactttgtgatcctaataatctttgtcattctggacgcacatttgatgcccagatagtgattatagagcacaaatccatcatctgcccaggctataatgcggtgctgcatattcatacctgtattgaggaggtggaaataacagccttaatctgcttggtagacaaaaaatcaggagaaaaaagtaagacccgaccccgttttgtcaaacaagatcaagtatgcattgctcgcttaaggacagcaggaaccatctgccttgagacctttaaagacttccctcagatgggtcgtttcaccttaagagatgagggtaagaccattgcaattggaaaagttctgaaactggttccagagaaagactaagcattttcttgatgaccctgcacaatactgtgaggaaaattgactgcagaagcctacttcacaccgccttctcttattttctgcccattgataaacctctccccatattttgcaaagaggaaattcacagcaaaagtccacattatgtcagctttctcatattgagagctctgctatgccactgttgaatttttcccaagattcctgtccctagccctcacttcaaactctgcttccttggacagatttggcaatagctttgtaagtgatgtggacataattgcctacaataatgaaaacctacaggaatttttttatttttcattttccccttaggcatatttagtatttttcccccaggcagatcattctgagtgtgcgagtgtgtgtgcacatgttacaaaggcaactaccatgttaataaaatattcaatttgaaatccttttcggtatttgaattgcttttgaataatgttttttatctggatgtaacattgttgcattagctttttaactttcccaagtaattgaatacattttattacttggacttttataaactctttccctacccactataaatgagacattcacagcgttcaagtttgtattaaaggaaaggattagtttgaccccttcttttgatggttaatgcatacatgcagttaaatccctttatgcaaatgtgacactgctttactaggtcttttagttatttatttattttttttttttttgccaatttatattgtaacatgatttcttgaacacagtaagttgttttaaaataaaagaacagcatactgtagtttttataagtaaagcgtaatgaaattgtacccctagagaaaattccattaacttgttaaattagtggaattaacaacaaataaagcatgtttgagacctggcaaaaattcctctggtagtatttataaatagagctgcatgcctctagtatgaaaaccgtatcagttgcaagtgccacttctacaagttactcagtttactctttgtatcagtaactttaaaggttggatgatccttgctggttaaagctaaatctcaacctagcaactaaatgaaaatatttagaatcatcagaatctgaacagactaaaattatcagcgataagcagaatcaagcagggtataagttttatctcaattatttgaaattgactgagttttcttaagtgtaaagctgaaatttgctaaccatgtttttgatgaaccacagtgcagcattgtgtgggttttagattgaatgactctctgctataattatcatgactttgaaatttttcatgagaataaatgaggaatggaggcaatttgtgggtttatccaaagcccccttgatgttgagtgttgccattgatcaaagatagcctcttttagattgtgatttctctctaaataagatactttgtatatttaatgacaagtctcttccctataattttgctcctcagaaaagaaaagcctagacagactgtatttccagtcacagaacataaaacttaatctaatgggtgttttgttttgttttgagacagaggctcactctgtcacctaggctggagtgcagtggctcgatctcagctcactgcagcctccacctcccggattcaagcaatttcctgcctcagcctcttgagtagctgggattacaggagccctccacgaggcccagttaatttttgtatctttagtggagacgaggtttccccctattggtcaggctggtctcaaacttctgacctcaagtgatccactcgcctcagcctctcaaaagtgctgggattacaggcatgaggcgccgcacttggcctagtgttttcttaactgtgaaattcccattcatttcttgaatgaggctacatcttatggacagagcaaagttattgtcctacagattcttaaaactataattatggctattgcatgaaatttaaatagattttattatgtctgcaaatctctgggcttttatttttctggaaaatataggagctttaatcaaaacataatagttctttttgtaattccatgttaataaaaacaaatactagcaattgcttgaattttaatgaatatttaaaagttcaagagccacggaaatcacttccagagataagagttccctttctaaatagaacacatttttaaaaaataagttatgtttgctactaaaacatttacactgttagactattatgtgcatgttgccaagactcttaagtaacttggatatcaactgtgaagggcctacctctaaaaagtaacaggtcatacaaatacaaatgtaactgtaaaaattccactggattcttgcatatttgcaagattagattattcaaaagaaatttcagtgctaaaattaaccagcaacataagttctatgggctttgaaaattgttctcatctttttaaagttgatgcattttcaatcctgcttacacaggctgttcatttggataagtaaataaaatgtctaaggtgaacttggcattatgtggagatgttggaccgttatagagcaatacaaattcctatgctgtcattctgttttctgcaaatgcaaacgtgcttatatggtcaacagtgcaaaaatagggtagttggctgcatatttagggtattacctaagcatttgttctctaacgttgctctactagaatgatttttttcttgcatcttttcacattaatgatgttctttatataactttcatgcgattatttagttttttaaattaataaagtgaatttaagaaatattgaaataaacatctaagtaattgccattttaaacccttgtttcttactgtgggagagggggaaatacagcactcatttcttgtttttaatttgcagaagtaagtgaaaatctatgtaaaatcaaaccaaaagagttggactgagtgtgtattgtcttgagattaagtgacaaatagtaaagtgttactgagtaattaagcccatgtattttttttttgtgagttgaaaatctttgaaatatgtgataaccgaatgtcaaaagttcctaaactctaacagtgcaggttgttcactgtaacgaggtaactcatatttgctggttacataaactacaagtactgctctcacaatatgggactttgaactgtgatgtagttcaacagttgccggcatcctctcagctgatacgctgcgaatattttgggttagacttgcagccagatgcagttttgcaacccaagaaaaaagttgaacctatgatcaaaaactgctcccaagatgaacctggaaaaaaatcagctaagctcccttggcgatctgcaggaacactagtaatgactggaattactccgtgatctttgatgactattacacataacagcactctagcaccttttcttactggcatggacttcctcatggactgctacttcatggatgatagcttcattgctttgggtagggatttaaggtagtcaaggggaaaatacgcagttttattacaggtcttaacatcaggcaactttcaactttaaaaccctttgtgaaaaatgtggttatagcactatagctctgattttaggatggttaaatgttatattcattgttggcctaccttatcaaactgtgccattaatcctttcacagacataggtaaggaagagaacaaccagtggattcaggggacaattatctatctccaaataataggcttttatttcttgcagctaactttttcagtgattctagcagatgccatctagtacatccttgatcttgtttctttcgtgagagatctcgccatggcagcatcttgttaagtaagtgtaattgcacatgcacaaaagacttaactagctttacatttagcagtcagttggttagattaggtttcatagtaaatgaataggaatagaaagaataggaagtgtttttattttccagtagtaattccgtggattccatttgacccagtttactatcagttcagttcaggtagatttggttcaacttttggtggtttttggctctaggatattcttgactttaatatcctagaacttactgagtcttcccttcaataaatacacttctcacatacctctaatcctatgcttccttgaaacaataatgctagctgagttgtttactaaggattattataagggcctgaaggtgtgggagtggagattaattaaaacctttatgttctccaatataagggaaaagcaggttggtactacttctgattaggcagaaaacaccaggattccttaagtgatccttgaaatggttattgttttctgccttgtcacatttgccactgtgccctttaaaacgatgtggaaacctcaggtttgtggacagcacaggtggaatgacatcttgtgcttcctgaggctcccctctaccaggcacattagcttagtgcttcagatgtcagcccaagtccttgttacctccttttcctgctgcccagggaagagtgtgtgtgctggagctggagcgcttgcactcttcaggtgactattctcacctccatttcctccacatgcattaggtgaaactgaggtctaagcctcctgcaaggtctacattttaaggactcacacatcaggctctcagaaatgtacacaggtattagttctgtttgttctaaaggaaatgtgggtatctctcaggccaggacttagtgactagttttcgctagacagcaggttaatacctagatctcatttaaaaaaaaaaaaaaaaaacaggattaaagggaactgatcaggtttgttgagttttttagcctaattccaaagcatggaagagtgctctaggtaggaaagaaagctttttcttacgatttgtagctacctactgtgcctgacttggtgcctgtgtgaggattaagcccttagtctgctcttgcaattattcaaatgacaaattaaatttgcttttgtaataacaataaaagttgtcatcttcccttttg

SEQ ID NO: 807 - DNA, 2503 bp, Homo sapiens
gttgagccgccatatctgctgctgccgccgcagttgcgaatgcagcatcggcgcttagctgcctccgcggtgcagctaaggttcgtgtcgctaccccttggcccttcgctcttgctgccttaaccccgccggcggagcccgctcttctggcctgttgagcccgctccctcactgccacacagcaagttccgagaccatggattcgggcagcagcagcagcgactcggcgcccgattgctgggaccaggtggacatggaatccccggggtcggccccgagcggggatggagtctcctctgcggtggccgaggcccagcgcgagcccctcagctcggctttcagccgtaagctcaacgtcaacgccaagcccttcgtgcctaacgtacacgccgcggagttcgtgccgtccttcctgcggggcccgactcagccgcccaccctcccggccggctccggcagcaacgatgaaacctgcaccggcgcgggataccctcaaggtaaaaggatgggacggggggcacctgtggaaccttcccgagaggaaccgttagtgtcgcttgaaggttccaattcagccgttaccatggaactttcagaacctgttgtagaaaatggagaggtggaaatggccctagaagaatcatgggagcacagtaaagaagtaagtgaagccgagcctgggggtggttcctcgggagattcagggcccccagaagaaagtggccaggaaatgatggaggaaaaagaggaaataagaaaatccaaatctgtgatcgtaccctcaggtgcacctaagaaagaacacgtaaatgtagtattcattggccatgtagacgctggcaagtcaaccatcggaggacagataatgtttttgactggaatggttgacaaaagaacactggagaaatatgaaagagaagctaaggaaaaaaacagagaaacctggtatttgtcctgggccttagatacaaatcaggaggaacgagacaagggtaaaacagtcgaagtgggtcgtgcctattttgaaacagaaaggaaacatttcacaattttagatgcccctggccacaagagttttgtcccaaatatgattggtggtgcttctcaagctgatttggctgtgctggtcatctctgccaggaaaggagagtttgaaactggatttgaaaaaggtggacagacaagagaacatgcgatgttggcaaaaacggcaggggtaaaacatttaatagtgcttattaataagatggatgatcccacagtaaattggagcatcgagagatatgaagaatgtaaagaaaaactggtgccctttttgaaaaaagtaggcttcagtccaaaaaaggacattcactttatgccctgctcaggactgaccggagcaaatattaaagagcagtcagatttctgcccttggtacactggattaccatttattccgtatttggataacttgccaaacttcaacagatcaattgatggaccaataagactgccaattgtggataagtacaaagatatgggcactgtggtcctgggaaagctggaatccgggtccatttttaaaggccagcagctcgtgatgatgccaaacaagcacaatgtagaagttcttggaatactttctgatgatactgaaactgattttgtagccccaggtgaaaacctcaaaatcagactgaagggaattgaagaagaagagattcttccaggattcatactttgtgatcctagtaacctctgccattctggacgcacgtttgatgttcagatagtgattattgagcacaaatccatcatctgcccaggttataatgcggtgctgcacattcatacttgtattgaggaagttgagataacagcgttaatctccttggtagacaaaaaatcaggagaaaaaagtaagacacgaccccgcttcgtgaaacaagatcaagtatgcattgctcgtttaaggacagcaggaaccatctgcctcgagacgttcaaagattttcctcagatgggtcgttttactttaagagatgagggtaagaccattgcaattggaaaagttctgaaattggtcccagagaaggactaagcaattttcttgatgcctctgcaagatactgtgaggagaattgacagcaaaagttcaccacctactcttatttactgcccattgattgacttttcttcatattttgcaaagagaaatttcacagcaaaaattcatgttttgtcagctttctcatgttgagatctgttatgtcactgatgaatttaccctcaagtttccttcctctgtaccactctgcttccttggacaatatcagtaatagctttgtaagtgatgtggacgtaattgcctacagtaatgaaaaattaatgtactttaatttttcattttcttttaggatatttagaccacccttgttccacgcaaaccagagtgtgtcagtgtttgtgtgtgtgttaaaatgataactaacatgtgaataaaatactccatttgaaactc

SEQ ID NO: 808 - DNA, 2803 bp, Homo sapiens
agagtgttgagccgccatatctgctgctgccgccgcagttgcgaatgcagcatcggcgcttagctgcctccgcggtgcagctaaggttcgtgtcgctaccccttggcccttcgctcttgctgccttaaccccgccggcggagcccgctcttctggcctgttgagcccgctccctcactgccacacagcaagttccgagaccatggattcgggcagcagcagcagcgactcggcgcccgattgctgggaccaggtggacatggaatccccggggtcggccccgagcggggatggagtctcctctgcggtggccgaggcccagcgcgagcccctcagctcggctttcagccgtaagctcaacgtcaacgccaagcccttcgtgcctaacgtacacgccgcggagttcgtgccgtccttcctgcggggcccgactcagccgcccaccctcccggccggctccggcagcaacgatgaaacctgcaccggcgcgggataccctcaaggtaaaaggatgggacggggggcacctgtggaaccttcccgagaggaaccgttagtgtcgcttgaaggttccaattcagccgttaccatggaactttcagaacctgttgtagaaaatggagaggtggaaatggccctagaagaatcatgggagcacagtaaagaagtaagtgaagccgagcctgggggtggttcctcgggagattcagggcccccagaagaaagtggccaggaaatgatggaggaaaaagaggaaataagaaaatccaaatctgtgatcgtaccctcaggtgcacctaagaaagaacacgtaaatgtagtattcattggccatgtagacgctggcaagtcaaccatcggaggacagataatgtttttgactggaatggttgacaaaagaacactggagaaatatgaaagagaagctaaggaaaaaaacagagaaacctggtatttgtcctgggccttagatacaaatcaggaggaacgagacaagggtaaaacagtcgaagtgggtcgtgcctattttgaaacagaaaggaaacatttcacaattttagatgcccctggccacaagagttttgtcccaaatatgattggtggtgcttctcaagctgatttggctgtgctggtcatctctgccaggaaaggagagtttgaaactggatttgaaaaaggtggacagacaagagaacatgcgatgttggcaaaaacggcaggggtaaaacatttaatagtgcttattaataagatggatgatcccacagtaaattggagcatcgagagatatgaagaatgtaaagaaaaactggtgccctttttgaaaaaagtaggcttcagtccaaaaaaggacattcactttatgccctgctcaggactgaccggagcaaatattaaagagcagtcagatttctgcccttggtacactggattaccatttattccgtatttggataacttgccaaacttcaacagatcaattgatggaccaataagactgccaattgtggataagtacaaagatatgggcactgtggtcctgggaaagctggaatccgggtccatttttaaaggccagcagctcgtgatgatgccaaacaagcacaatgtagaagttcttggaatactttctgatgatactgaaactgattttgtagccccaggtgaaaacctcaaaatcagactgaagggaattgaagaagaagagattcttccaggattcatactttgtgatcctagtaacctctgccattctggacgcacgtttgatgttcagatagtgattattgagcacaaatccatcatctgcccaggttataatgcggtgctgcacattcatacttgtattgaggaagttgagataacagcgttaatctccttggtagacaaaaaatcaggagaaaaaagtaagacacgaccccgcttcgtgaaacaagatcaagtatgcattgctcgtttaaggacagcaggaaccatctgcctcgagacgttcaaagattttcctcagatgggtcgttttactttaagagatgagggtaagaccattgcaattggaaaagttctgaaattggtcccagagaaggactaagcaattttcttgatgcctctgcaagatactgtgaggagaattgacagcaaaagttcaccacctactcttatttactgcccattgattgacttttcttcatattttgcaaagagaaatttcacagcaaaaattcatgttttgtcagctttctcatgttgagatctgttatgtcactgatgaatttaccctcaagtttccttcctctgtaccactctgcttccttggacaatatcagtaatagctttgtaagtgatgtggacgtaattgcctacagtaatgaaaaattaatgtactttaatttttcattttcttttaggatatttagaccacccttgttccacgcaaaccagagtgtgtcagtgtttgtgtgtgtgttaaaatgataactaacatgtgaataaaatactccatttgaaactcttcggttatttgaaatgcttttgaataatgtttaaatgtcattatgtaatgctattcaattagctttattactttctcaaatagttgaatatgttctatcacttaaaaacttaaaaactcttcaccacttactgttttaagtgaggaatttacaaacaatgcataagtgtgtattaaaggaataattttaattttgagaaaaaaacgtatgttaaggctcttcccagtgggctttgttttctctgtccaagtccagtcaataaaggagctcttctgcttccccacttgtgatttg

SEQ ID NO: 809 - DNA, 1067 bp, Homo sapiens
ccgtggatacagaaatctctgcaggcaagttgctccagagcatattgcaggacaagcctgtaacgaatagttaaattcacggcatctggattcctaatccttttccgaaatggcaggtgtgagtgcctgtataaaatattctatgtttaccttcaacttcttgttctggctatgtggtatcttgatcctagcattagcaatatgggtacgagtaagcaatgactctcaagcaatttttggttctgaagatgtaggctctagctcctacgttgctgtggacatattgattgctgtaggtgccatcatcatgattctgggcttcctgggatgctgcggtgctataaaagaaagtcgctgcatgcttctgttgtttttcataggcttgcttctgatcctgctcctgcaggtggcgacaggtatcctaggagctgttttcaaatctaagtctgatcgcattgtgaatgaaactctctatgaaaacacaaagcttttgagcgccacaggggaaagtgaaaaacaattccaggaagccataattgtgtttcaagaagagtttaaatgctgcggtttggtcaatggagctgctgattggggaaataattttcaacactatcctgaattatgtgcctgtctagataagcagagaccatgccaaagctataatggaaaacaagtttacaaagagacctgtatttctttcataaaagacttcttggcaaaaaatttgattatagttattggaatatcatttggactggcagttattgagatactgggtttggtgttttctatggtcctgtattgccagatcgggaacaaatgaatctgtggatgcatcaacctatcgtcagtcaaacccctttaaaatgttgctttggctttgtaaatttaaatatgtaagtgctatataagtcaggagcagctgtctttttaaaatgtctcggctagctagaccacagatatcttctagacatattgaacacatttaagatttgagggatataagggaaaatgatatgaatgtgtatttttactcaaaataaaagtaactgtttacgttggtgctt

SEQ ID NO: 810 - DNA, 1198 bp, Homo sapiens
acttgatatctgtttactttagaggaggcagtttttgagaaaggatcataaatatcctggcccagtgccccaggagctatgacaagcaaaggaacatacttgcctggagatagcctttgcgatatttaaatccgtggatacagaaatctctgcaggcaagttgctccagagcatattgcaggacaagcctgtaacgaatagttaaattcacggcatctggattcctaatccttttccgaaatggcaggtgtgagtgcctgtataaaatattctatgtttaccttcaacttcttgttctggctatgtggtatcttgatcctagcattagcaatatgggtacgagtaagcaatgactctcaagcaatttttggttctgaagatgtaggctctagctcctacgttgctgtggacatattgattgctgtaggtgccatcatcatgattctgggcttcctgggatgctgcggtgctataaaagaaagtcgctgcatgcttctgttgtttttcataggcttgcttctgatcctgctcctgcaggtggcgacaggtatcctaggagctgttttcaaatctaagtctgatcgcattgtgaatgaaactctctatgaaaacacaaagcttttgagcgccacaggggaaagtgaaaaacaattccaggaagccataattgtgtttcaagaagagtttaaatgctgcggtttggtcaatggagctgctgattggggaaataattttcaacactatcctgaattatgtgcctgtctagataagcagagaccatgccaaagctataatggaaaacaagtttacaaagagacctgtatttctttcataaaagacttcttggcaaaaaatttgattatagttattggaatatcatttggactggcagttattgagatactgggtttggtgttttctatggtcctgtattgccagatcgggaacaaatgaatctgtggatgcatcaacctatcgtcagtcaaacccctttaaaatgttgctttggctttgtaaatttaaatatgtaagtgctatataagtcaggagcagctgtctttttaaaatgtctcggctagctagaccacagatatcttctagacatattgaacacatttaagatttgagggatataagggaaaatgatatgaatgtgtatttttactcaaaataaaagtaactgtttacgttggtgctt

SEQ ID NO: 811 - DNA, 1159 bp, Homo sapiens
agtgccccaggagctatgacaagcaaaggaacatacttgcctggagatagcctttgcgatatttaaatgtccgtggatacagaaatctctgcaggcaagttgctccagagcatattgcaggacaagcctgtaacgaatagttaaattcacggcatctggattcctaatccttttccgaaatggcaggtgtgagtgcctgtataaaatattctatgtttaccttcaacttcttgttctggctatgtggtatcttgatcctagcattagcaatatgggtacgagtaagcaatgactctcaagcaatttttggttctgaagatgtaggctctagctcctacgttgctgtggacatattgattgctgtaggtgccatcatcatgattctgggcttcctgggatgctgcggtgctataaaagaaagtcgctgcatgcttctgttgtttttcataggcttgcttctgatcctgctcctgcaggtggcgacaggtatcctaggagctgttttcaaatctaagtctgatcgcattgtgaatgaaactctctatgaaaacacaaagcttttgagcgccacaggggaaagtgaaaaacaattccaggaagccataattgtgtttcaagaagagtttaaatgctgcggtttggtcaatggagctgctgattggggaaataattttcaacactatcctgaattatgtgcctgtctagataagcagagaccatgccaaagctataatggaaaacaagtttacaaagagacctgtatttctttcataaaagacttcttggcaaaaaatttgattatagttattggaatatcatttggactggcagttattgagatactgggtttggtgttttctatggtcctgtattgccagatcgggaacaaatgaatctgtggatgcatcaacctatcgtcagtcaaacccctttaaaatgttgctttggctttgtaaatttaaatatgtaagtgctatataagtcaggagcagctgtctttttaaaatgtctcggctagctagaccacagatatcttctagacatattgaacacatttaagatttgagggatataagggaaaatgatatgaatgtgtatttttactcaaaataaaagtaactgtttacgttaaaaaaaaaaaaaaaaaaaaaaaaaaaaa

SEQ ID NO: 812 - DNA, 1216 bp, Homo sapiens
cagtgccattcccttcacttgatatctgtttactttagaggaggcagtttttgagaaaggatcataaatatcctggcccagtgccccaggagctatgacaagcaaaggaacatacttgcctggagatagcctttgcgatatttaaatgtccgtggatacagaaatctctgcaggcaagttgctccagagcatattgcaggacaagcctgtaacgaatagttaaattcacggcatctggattcctaatccttttccgaaatggcaggtgtgagtgcctgtataaaatattctatgtttaccttcaacttcttgttctggctatgtggtatcttgatcctagcattagcaatatgggtacgagtaagcaatgactctcaagcaatttttggttctgaagatgtaggctctagctcctacgttgctgtggacatattgattgctgtaggtgccatcatcatgattctgggcttcctgggatgctgcggtgctataaaagaaagtcgctgcatgcttctgttgtttttcataggcttgcttctgatcctgctcctgcaggtggcgacaggtatcctaggagctgttttcaaatctaagtctgatcgcattgtgaatgaaactctctatgaaaacacaaagcttttgagcgccacaggggaaagtgaaaaacaattccaggaagccataattgtgtttcaagaagagtttaaatgctgcggtttggtcaatggagctgctgattggggaaataattttcaacactatcctgaattatgtgcctgtctagataagcagagaccatgccaaagctataatggaaaacaagtttacaaagagacctgtatttctttcataaaagacttcttggcaaaaaatttgattatagttattggaatatcatttggactggcagttattgagatactgggtttggtgttttctatggtcctgtattgccagatcgggaacaaatgaatctgtggatgcatcaacctatcgtcagtcaaacccctttaaaatgttgctttggctttgtaaatttaaatatgtaagtgctatataagtcaggagcagctgtctttttaaaatgtctcggctagctagaccacagatatcttctagacatattgaacacatttaagatttgagggatataagggaaaatgatatgaatgtgtatttttactcaaaataaaagtaactgtttacgttggtgctt

SEQ ID NO: 813 - DNA, 1239 bp, Homo sapiens
gcggcgcctgggacggttgcggtgggtctgggcgctgggaagtcgtccaagatgattaaaaaattcgacaagaaggacgaggagtctggtagtggctccaatcctttccagcatctggagaagagtgctgttttacaggaggctcgtatattcaatgaaactccaatcaatccaagaagatgtttgcatattcttacaaagattctttacttactgaaccagggtgaacactttggaacaacggaagctacagaagccttctttgcaatgacgcgattgtttcaatctaatgatcaaacattgaggagaatgtgctaccttaccatcaaagaaatggctaccatctctgaggatgtgataattgtcacaagcagtctgactaaagacatgactggaaaagaagatgtataccgaggcccggccatcagagctctctgcaggatcaccgatggaacaatgttgcaagccattgaaagatacatgaagcaggccattgtggataaagtttccagtgtatccagttcagcactggtatcttccctgcacatgatgaagataagctatgatgtggttaagcgctggatcaatgaagcccaagaagctgcatcaagtgataatattatggtccagtaccatgcattgggagtcctgtatcaccttagaaagaatgatcgacttgctgtttccaagatgttgaataagtttactaaatctggtctcaagtcacagtttgcttactgcatgctgatccgaattgccagtcgcttactaaaagaaactgaggatggctgcaccatgaagtttacagtccgggactgtgaccctaacactggagttccagatgaggatgggtatgatgatgagtatgtgctggaagatctcgaagtgactgtgtctgaccatattcagaaagtactgaagcctaactttgctgctgcttgggaagaggtgggagatacctttgagaaagaggaaacctttgccctcagttctaccaaaacccttgaagaggctgtcaacaatatcatcacatttctgggcatgcagccatgtgagaggtccgataaagtacctgagaacaagaattcccattcgctctatctggcaggtatattcagaggtggctatgatttattggtgaggtccaggctggccttagccgatggagtgaccatgcaggtgactgtcagaagtaaagagagaacacctgtagatgttatcttagcttctgttggataa

SEQ ID NO: 814 - DNA, 3114 bp, Homo sapiens
ggggcccggaagtggtccctgtagaaccactgtggcaccgctactccgtgccgcgcccgtcgagcattgcgttgctgcattgcgccccaccgactccactatgttgaagaaattcgacaagaaggatgaggagtcaggtggaggctccaacccattccagcaccttgagaagagtgcggtactccaggaggcccgtgtatttaatgaaactcccatcaaccctcggaaatgtgcccacatcctcaccaagattctttatctcataaaccagggggagcacctggggaccacggaagcgaccgaggccttctttgccatgaccaagctctttcagtccaatgatcccacactccgtcggatgtgctacttgaccatcaaggagatgtcttgcattgcagaggatgtcatcattgtcaccagcagcctaacaaaagacatgactgggaaagaagacaactaccggggcccggccgtgcgagccctctgccagatcactgatagcaccatgctgcaggctattgagcgctacatgaaacaagccattgtggacaaggtgcccagtgtctccagctctgccctcgtgtcttccttgcacctgctgaagtgcagctttgacgtggtcaagcgctgggtgaatgaggctcaggaggcagcatccagtgataacatcatggtccagtaccacgcactagggctcctgtaccatgtgcgtaagaatgaccgcctagccgtcaataagatgatcagcaaggtcacacggcatggccttaagtctccctttgcctactgcatgatgatccgggtggccagcaagcagctggaagaggaggatggcagccgtgacagcccactgtttgacttcatcgagagctgcttgcgcaacaagcacgagatggtggtgtatgaagccgcctcggccatcgtcaatctgccaggctgcagtgccaaagagctggccccggctgtgtcagtgctccagcttttctgcagctcacccaaggctgctctccgctatgctgctgttcgtaccctcaataaggttgccatgaagcatccgtcagctgtgacagcttgtaatctggatctggagaacctggtcacagattcaaaccgcagcattgccacgctggccatcaccaccctccttaagacgggcagcgagagcagcatcgaccgcctcatgaagcagatctcctccttcatgtcagaaatctcggatgaattcaaggtggtggttgtccaggccatcagtgccctgtgtcagaaatatcctcgcaaacacgccgtccttatgaacttcctgttcaccatgctgcgggaagagggtggctttgagtataagcgcgctatcgtggactgcatcatcagcatcattgaagagaactcagagagcaaggagacagggctgtcacatctgtgcgagttcatcgaggactgcgagttcacagtgctggccacccgtattctacatctcctgggccaggaggggcccaagaccaccaatccctcaaagtacatccgcttcatctataaccgagtggtcttggagcatgaggaggtccgggcaggtgctgtgagtgctctggcgaagtttggagcccagaatgaagagatgttacccagtatcttggtgttgctgaagaggtgtgtgatggatgatgacaatgaagtaagggaccgagccaccttctacctaaatgtcctggagcagaagcagaaggcccttaatgcaggctatatcctaaatggtctgactgtgtccatccctggtctggagagggctctgcagcagtacactctagaaccatcagaaaaaccttttgacctcaagtctgtgcccctggccacggcgcccatggcagagcagagaacagaaagtacccccatcacagcagtcaaacagcctgagaaagtggcagctaccaggcaggagatcttccaggagcagttggcagcagtgccagagttccgcggtcttgggcccctcttcaagtcctcgcctgagcccgtggccctcaccgagtcagagacggagtatgtcatccgctgcaccaaacacaccttcaccaaccacatggtttttcagtttgactgcacaaacacactcaatgaccagaccttggagaatgtcacagtgcagatggagcccactgaggcctatgaggtgctctgttacgtgcctgcccggagcctgccctacaaccagcccgggacctgctacacactggtggcactgcccaaagaagaccccacagctgtggcctgcacattcagctgcatgatgaagttcactgtcaaggactgtgatcccaccactggggagactgatgacgaaggctatgaggatgagtatgtgctggaagatctggaagttactgtagctgatcacattcaaaaggtcatgaaactgaacttcgaagcagcctgggatgaggtaggggatgaatttgagaaggaggaaacgttcaccttgtctaccatcaagacacttgaagaggctgtgggtaatattgtgaagttcttgggaatgcacccttgtgagaggtcagacaaagtgccggataacaagaacacccacacgttgctcctggctggtgtgttccggggtggtcatgacatcctggtgcgctcccggctgctgcttttggacacagtgacaatgcaggtgacagccagaagtttggaggagctgccagtagacatcatcttggcatctgtgggataagaggccagcctgcataggacctcatacccttccccaacactacctggaagttgtgccttcctcatgaaactggcagaaaccccttcccaagcttctgtattgaaaaacaattaggaatcattgcagatttttttttattctgctcccacctcccacccgggactacttgctggtgactttttttttttttttttttaaataggggatgattttagcttgtcctaaatcttgctgtccacccttccaggaaagggacattgtaaatgaataaaacattctcaactcctcttgaatctatcccccaagaaaccatcttatccctgtaataaatcagcatgtatttattgaaaaaaaaaaaaaaaaaaaaaaaaaaaaaaaaaaaaaaaaaa

SEQ ID NO: 815 - DNA, 3116 bp, Homo sapiens
ttccgctcgccggctgcggcgcctgggacggttgcggtgggtctgggcgctgggaagtcgtccaagatgattaaaaaattcgacaagaaggacgaggagtctggtagtggctccaatcctttccagcatctggagaagagtgctgttttacaggaggctcgtatattcaatgaaactccaatcaatccaagaagatgtttgcatattcttacaaagattctttacttactgaaccagggtgaacactttggaacaacggaagctacagaagccttctttgcaatgacgcgattgtttcaatctaatgatcaaacattgaggagaatgtgctaccttaccatcaaagaaatggctaccatctctgaggatgtgataattgtcacaagcagtctgactaaagacatgactggaaaagaagatgtataccgaggcccggccatcagagctctctgcaggatcaccgatggaacaatgttgcaagccattgaaagatacatgaagcaggccattgtggataaagtttccagtgtatccagttcagcactggtatcttccctgcacatgatgaagataagctatgatgtggttaagcgctggatcaatgaagcccaagaagctgcatcaagtgataatattatggtccagtaccatgcattgggagtcctgtatcaccttagaaagaatgatcgacttgctgtttccaagatgttgaataagtttactaaatctggtctcaagtcacagtttgcttactgcatgctgatccgaattgccagtcgcttactaaaagaaactgaggatggccatgaaagtccactgtttgatttcattgagagctgcttgcgaaataaacatgaaatggttatttatgaagctgcttcagctatcatccatcttcctaactgcactgcaagagagttggcacctgctgtttcagttcttcaacttttctgtagttctcctaagccagccttgagatatgcagctgtgaggaccttgaacaaggtggcaatgaagcacccctctgctgttactgcctgcaatctggacttagaaaacttaatcacagactcaaacagaagcattgctaccttagccattactacactcctcaaaacaggaagtgagagcagtgtggaccggctcatgaagcagatatcttcttttgtgtctgaaatctcagatgagttcaaggtggtggttgtacaggcaattagtgctctctgtcagaaataccctcgaaagcacagtgtcatgatgactttcctctccaacatgctccgagatgatggaggctttgagtacaagcgggccattgtggactgtataatcagcattgtggaagagaaccctgagagtaaagaagcaggcctagcccacctttgtgaattcattgaggactgtgaacacactgttctggctactaagattctacacttgttgggcaaagagggccctagaacgcctgtcccctccaaatatatccgttttatttttaatagggttgtcctggagaatgaggctgtcagagctgctgctgtgagtgctttggctaaatttggggctcagaatgagagtcttctcccaagcatccttgtactcttacagaggtgtatgatggatactgatgacgaggtacgagacagagctaccttctatctgaatgtgctgcagcagaggcagatggcactaaatgccacatatatctttaatggtttgacggtctctgtaccagggatggaaaaagccttacaccagtacacgttggagccttcagaaaaaccgtttgacatgaaatcaattcctcttgctatggctcctgtctttgaacagaaagcagaaatcacacttgtggctactaagccagagaagttggctccttccaggcaagacattttccaagaacaattggctgccattcctgagtttctgaatataggacccttgttcaagtcttctgagcctgttcaacttacagaagcagagacagaatattttgttcgatgtatcaagcacatgtttaccaatcacatcgtgttccagtttgactgcaccaacactctcaatgaccagctgctggaaaaagtgacagtgcagatggagccatcagattcctatgaagtgctgtcttgtatcccagcccccagccttccttataaccaaccaggaatatgttacactcttgttcgtttgcctgatgatgaccctacagcagttgcaggctcctttagctgcaccatgaagtttacagtccgggactgtgaccctaacactggagttccagatgaggatgggtatgatgatgagtatgtgctggaagatctcgaagtgactgtgtctgaccatattcagaaagtactgaagcctaactttgctgctgcttgggaagaggtgggagatacctttgagaaagaggaaacctttgccctcagttctaccaaaacccttgaagaggctgtcaacaatatcatcacatttctgggcatgcagccatgtgagaggtccgataaagtacctgagaacaagaattcccattcgctctatctggcaggtatattcagaggtggctatgatttattggtgaggtccaggctggccttagccgatggagtgaccatgcaggtgactgtcagaagtaaagagagaacacctgtagatgttatcttagcttctgttggataaatgcttactggacaagaggaaactgatgcacactacatggtcagtgggcttttaggctagtggcatcagtttcccagaatcagacttttgaagatgaatgactttggagaagcaaattaaacatttggccctgagccagcagatcaagcaaatgtctatctttgcgcatgggttgttttttttttttttctttttattctacttggtcagctttgggacgatagtgcagctttgggtgatcttgaaaatcaaatactatcctatactccagctgcttaacttcattttattctttaatgtgtacctgaaagctcctggcaatgctggaaaatttttatcccagaggggtgggggggaggggggaggggaagccagagtccacttttgtcacaattcatttttattaatagaaaataaacacttattccagtttc

SEQ ID NO: 816 - DNA, 3100 bp, Homo sapiens
gggctgcggcgcctgggacggttgcggtgggtctgggcgctgggaagtcgtccaagatgattaaaaaattcgacaagaaggacgaggagtctggtagtggctccaatcctttccagcatctggagaagagtgctgttttacaggaggctcgtatattcaatgaaactccaatcaatccaagaagatgtttgcatattcttacaaagattctttacttactgaaccagggtgaacactttggaacaacggaagctacagaagccttctttgcaatgacgcgattgtttcaatctaatgatcaaacattgaggagaatgtgctaccttaccatcaaagaaatggctaccatctctgaggatgtgataattgtcacaagcagtctgactaaagacatgactggaaaagaagatgtataccgaggcccggccatcagagctctctgcaggatcaccgatggaacaatgttgcaagccattgaaagatacatgaagcaggccattgtggataaagtttccagtgtatccagttcagcactggtatcttccctgcacatgatgaagataagctatgatgtggttaagcgctggatcaatgaagcccaagaagctgcatcaagtgataatattatggtccagtaccatgcattgggagtcctgtatcaccttagaaagaatgatcgacttgctgtttccaagatgttgaataagtttactaaatctggtctcaagtcacagtttgcttactgcatgctgatccgaattgccagtcgcttactaaaagaaactgaggatggccatgaaagtccactgtttgatttcattgagagctgcttgcgaaataaacatgaaatggttatttatgaagctgcttcagctatcatccatcttcctaactgcactgcaagagagttggcacctgctgtttcagttcttcaacttttctgtagttctcctaagccagccttgagatatgcagctgtgaggaccttgaacaaggtggcaatgaagcacccctctgctgttactgcctgcaatctggacttagaaaacttaatcacagactcaaacagaagcattgctaccttagccattactacactcctcaaaacaggaagtgagagcagtgtggaccggctcatgaagcagatatcttcttttgtgtctgaaatctcagatgagttcaaggtggtggttgtacaggcaattagtgctctctgtcagaaataccctcgaaagcacagtgtcatgatgactttcctctccaacatgctccgagatgatggaggctttgagtacaagcgggccattgtggactgtataatcagcattgtggaagagaaccctgagagtaaagaagcaggcctagcccacctttgtgaattcattgaggactgtgaacacactgttctggctactaagattctacacttgttgggcaaagagggccctagaacgcctgtcccctccaaatatatccgttttatttttaatagggttgtcctggagaatgaggctgtcagagctgctgctgtgagtgctttggctaaatttggggctcagaatgagagtcttctcccaagcatccttgtactcttacagaggtgtatgatggatactgatgacgaggtacgagacagagctaccttctatctgaatgtgctgcagcagaggcagatggcactaaatgccacatatatctttaatggtttgacggtctctgtaccagggatggaaaaagccttacaccagtacacgttggagccttcagaaaaaccgtttgacatgaaatcaattcctcttgctatggctcctgtctttgaacagaaagcagaaatcacacttgtggctactaagccagagaagttggctccttccaggcaagacattttccaagaacaattggctgccattcctgagtttctgaatataggacccttgttcaagtcttctgagcctgttcaacttacagaagcagagacagaatattttgttcgatgtatcaagcacatgtttaccaatcacatcgtgttccagtttgactgcaccaacactctcaatgaccagctgctggaaaaagtgacagtgcagatggagccatcagattcctatgaagtgctgtcttgtatcccagcccccagccttccttataaccaaccaggaatatgttacactcttgttcgtttgcctgatgatgaccctacagcagttgcaggctcctttagctgcaccatgaagtttacagtccgggactgtgaccctaacactggagttccagatgaggatgggtatgatgatgagtatgtgctggaagatctcgaagtgactgtgtctgaccatattcagaaagtactgaagcctaactttgctgctgcttgggaagaggtgggagatacctttgagaaagaggaaacctttgccctcagttctaccaaaacccttgaagaggctgtcaacaatatcatcacatttctgggcatgcagccatgtgagaggtccgataaagtacctgagaacaagaattcccattcgctctatctggcaggtatattcagaggtggctatgatttattggtgaggtccaggctggccttagccgatggagtgaccatgcaggtgactgtcagaagtaaagagagaacacctgtagatgttatcttagcttctgttggataaatgcttactggacaagaggaaactgatgcacactacatggtcagtgggcttttaggctagtggcatcagtttcccagaatcagacttttgaagatgaatgactttggagaagcaaattaaacatttggccctgagccagcagatcacaagaaatgtctatctttgcgcatgggttgttttttttttttttctttttattctacttggtcagctttgggacgatagtgcagctttgggtgatcttgaaaatcaaatactatcctatactccagctgcttaacttcattttattctttaatgtgtacctgaaagctcctggcaatgctggaaaatttttatcccagaggggtgggggtgaggggggaggggaagccagagtccacttttgtcacaattcatttttattaatagaaaataaacacttattc

SEQ ID NO: 817 - DNA, 3083 bp, Homo sapiens
cagtcggggcccggaagtggtccctgtagaaccactgtggcaccgctactccgtgccgcgcccgtcgagcattgcgttgctgcattgcgccccaccgactccactatgttgaagaaattcgacaagaaggatgaggagtcaggtggaggctccaacccattccagcaccttgagaagagtgcggtactccaggaggcccgtgtatttaatgaaactcccatcaaccctcggaaatgtgcccacatcctcaccaagattctttatctcataaaccagggggagcacctggggaccacggaagcgaccgaggccttctttgccatgaccaagctctttcagtccaatgatcccacactccgtcggatgtgctacttgaccatcaaggagatgtcttgcattgcagaggatgtcatcattgtcaccagcagcctaacaaaagacatgactgggaaagaagacaactaccggggcccggccgtgcgagccctctgccagatcactgatagcaccatgctgcaggctattgagcgctacatgaaacaagccattgtggacaaggtgcccagtgtctccagctctgccctcgtgtcttccttgcacctgctgaagtgcagctttgacgtggtcaagcgctgggtgaatgaggctcaggaggcagcatccagtgataacatcatggtccagtaccacgcactagggctcctgtaccatgtgcgtaagaatgaccgcctagccgtcaataagatgatcagcaaggtcacacggcatggccttaagtctccctttgcctactgcatgatgatccgggtggccagcaagcagctggaagaggaggatggcagccgtgacagcccactgtttgacttcatcgagagctgcttgcgcaacaagcacgagatggtggtgtatgaagccgcctcggccatcgtcaatctgccaggctgcagtgccaaagagctggccccggctgtgtcagtgctccagcttttctgcagctcacccaaggctgctctccgctatgctgctgttcgtaccctcaataaggttgccatgaagcatccgtcagctgtgacagcttgtaatctggatctggagaacctggtcacagattcaaaccgcagcattgccacgctggccatcaccaccctccttaagacgggcagcgagagcagcatcgaccgcctcatgaagcagatctcctccttcatgtcagaaatctcggatgaattcaaggtggtggttgtccaggccatcagtgccctgtgtcagaaatatcctcgcaaacacgccgtccttatgaacttcctgttcaccatgctgcgggaagagggtggctttgagtataagcgcgctatcgtggactgcatcatcagcatcattgaagagaactcagagagcaaggagacagggctgtcacatctgtgcgagttcatcgaggactgcgagttcacagtgctggccacccgtattctacatctcctgggccaggaggggcccaagaccaccaatccctcaaagtacatccgcttcatctataaccgagtggtcttggagcatgaggaggtccgggcaggtgctgtgagtgctctggcgaagtttggagcccagaatgaagagatgttacccagtatcttggtgttgctgaagaggtgtgtgatggatgatgacaatgaagtaagggaccgagccaccttctacctaaatgtcctggagcagaagcagaaggcccttaatgcaggctatatcctaaatggtctgactgtgtccatccctggtctggagagggctctgcagcagtacactctagaaccatcagaaaaaccttttgacctcaagtctgtgcccctggccacggcgcccatggcagagcagagaacagaaagtacccccatcacagcagtcaaacagcctgagaaagtggcagctaccaggcaggagatcttccaggagcagttggcagcagtgccagagttccgcggtcttgggcccctcttcaagtcctcgcctgagcccgtggccctcaccgagtcagagacggagtatgtcatccgctgcaccaaacacaccttcaccaaccacatggtttttcagtttgactgcacaaacacactcaatgaccagaccttggagaatgtcacagtgcagatggagcccactgaggcctatgaggtgctctgttacgtgcctgcccggagcctgccctacaaccagcccgggacctgctacacactggtggcactgcccaaagaagaccccacagctgtggcctgcacattcagctgcatgatgaagttcactgtcaaggactgtgatcccaccactggggagactgatgacgaaggctatgaggatgagtatgtgctggaagatctggaagttactgtagctgatcacattcaaaaggtcatgaaactgaacttcgaagcagcctgggatgaggtaggggatgaatttgagaaggaggaaacgttcaccttgtctaccatcaagacacttgaagaggctgtgggtaatattgtgaagttcttgggaatgcacccttgtgagaggtcagacaaagtgccggataacaagaacacccacacgttgctcctggctggtgtgttccggggtggtcatgacatcctggtgcgctcccggctgctgcttttggacacagtgacaatgcaggtgacagccagaagtttggaggagctgccagtagacatcatcttggcatctgtgggataagaggccagcctgcataggacctcatacccttccccaacactacctggaagttgtgccttcctcatgaaactggcagaaaccccttcccaagcttctgtattgaaaaacaattaggaatcattgcagatttttttttattctgctcccacctcccacccgggactacttgctggtgacttttttttttttttttttttaaataggggatgattttagcttgtcctaaatcttgctgtccacccttccaggaaagggacattgtaaatgaataaaacattctcaactcctcttgaatctatcccccaagaaaccatcttatccctgtaataaatcagcatgtatttattgaatga

SEQ ID NO: 818 - DNA, 1042 bp, Homo sapiens
ggtggctccattttccatttgagctcaaatattttgctgcttcctctgtagctgccagacctgctcttgctgctgctcaggtagaacatctgggaggtcccttgctgaccactggaagaagatgagctcgagctattggagtgagacgagcagcagcagctgtggaacccagcagctcccagaggtgctgcagtgccagccccagcattaccactgctaccatcagtcaagccaagcccagcagcctccagaaaaaaatgtagtgtatgagcgagtgaggacctacagtgggcccatgaacaaggtggtgcaggccttggaccccttcaactcacgggaagtgctctcccctctcaaaaccacctcctcctaccaaaatttggtttggagcgaccattctcaggaactccattctccaactttaaaaatatctacatgtgccccaagtactctacatataacccaaaatactgaacaggaacttcattctccaacagtgaaacttactacatatccacagaccactattaggaaatatgtagtacaaaatcctgaacaggaaccactgtctcaattcctaagaggaagccatttcttcccaggaaacaatgttatttatgaaaaaacaataagaaaagtggagaagctaaatactgatcaggggtgccatcctcaggctcaatgccatcatcacattatccaacagccccaggtcatccactctgcacactggcaacaacctgattctagccagcaaatccaagccatcacaggaaataatccaatttctacacatattggaaatgaactgtgccatagtggatcaagccagatttgtgagcaggtgataattcaggatgatggccctgaaaaattggaccccagatattttggagagttgcttgctgatctgagccgtaagaatacggatctatatcactgcttattagaacatttgcagagaattggaggaagaaaacaatctctctcttcgacatacactatcagacatggaatacagactaaaagaactggaatattg

SEQ ID NO: 819 - DNA, 3916 bp, Homo sapiens
ggtggctccattttccatttgagctcaaatattttgctgcttcctctgtagctgccagacctgctcttgctgctgctcaggtagaacatctgggaggtcccttgctgaccactggaagaagatgagctcgagctattggagtgagacgagcagcagcagctgtggaacccagcagctcccagaggtgctgcagtgccagccccagcattaccactgctaccatcagtcaagccaagcccagcagcctccagaaaaaaatgtagtgtatgagcgagtgaggacctacagtgggcccatgaacaaggtggtgcaggccttggaccccttcaactcacgggaagtgctctcccctctcaaaaccacctcctcctaccaaaatttggtttggagcgaccattctcaggaactccattctccaactttaaaaatatctacatgtgccccaagtactctacatataacccaaaatactgaacaggaacttcattctccaacagtgaaacttactacatatccacagaccactattaggaaatatgtagtacaaaatcctgaacaggaaccactgtctcaattcctaagaggaagccatttcttcccaggaaacaatgttatttatgaaaaaacaataagaaaagtggagaagctaaatactgatcaggggtgccatcctcaggctcaatgccatcatcacattatccaacagccccaggtcatccactctgcacactggcaacaacctgattctagccagcaaatccaagccatcacaggaaataatccaatttctacacatattggaaatgaactgtgccatagtggatcaagccagatttgtgagcaggtgataattcaggatgatggccctgaaaaattggaccccagatattttggagagttgcttgctgatctgagccgtaagaatacggatctatatcactgcttattagaacatttgcagagaattggaggaagcaaacaggactttgagtctacagatgagtcggaagacattgaatcattgattcctaaaggattatcagagtttacaaaacagcaaatacgctacattctgcagatgaggggtatgtctgataagtcactccgactagtgctgtccacatttagcaacatacgggaggagcttggacatcttcaaaatgatttgacatcactggaaaatgacaagatgagacttgagaaagatttatcattcaaagacactcaattaaaagagtacgaagaactcttggcatcagtgagagcaaataatcaccagcagcagcaaggacttcaagactcaagttcaaaatgccaggcattggaagaaaacaatctctctcttcgacatacactatcagacatggaatacagactaaaagaactggaatattgtaaacgtaatttagagcaagagaatcaaaaccttagaatgcaggtttctgagacttgcacaggcccaatgttgcaggctaaaatggatgagattggcaaccactacacggagatggtaaaaaacttgagaatggagaaagatagagagatctgcagactgaggtcccaattaaaccagtaccataaagatgtttcaaagagagaaggaagttgtagtgacttccaatttaagcttcatgaactgacaagcttgctggaagagaaggattccctcataaagcgtcagtcagaggaactctccaagttgcggcaagaaatatattcctctcataaccaaccctccactggtggaaggactactattaccactaaaaagtacaggacacaatatccaatcctaggcctcctatatgatgactacgaatatataccaccaggtagtgaaacacagactattgtgattgagaaaacagaagacaaatacacttgtccatgaatggatccactttaaagtattacaactcaaagccgttttttttttgtgtgtgtgtctctgcattagtactttgttatttttccatcactaaaggccaatcagaatttggaaccatgctgctacccaagaaatctaatggaatgaattagttctgtagatgacaatttcttcacccatttatgagacctaaatcttttccataacactcatgtattcagtataacaacatactaactgaaagagggacctgattgtttaaagtttgattgcagacactgtagaacataactcattatgtttcagataaggtaactcctagatatcaaactaatttgttggggtagagattttacaagtcatgccattagaagattttctctgatattatatgtgcagttcagttacaagatgaaatcatgtttttttaacaaaagagataaaatacaattgaagcaaaaaataacagctagtatataatatatacagtctgtatttgcttttcacagtaggcctgatgactaaaagatatgctttattacacgctattttcacctcttgaaagtcaaaggtgatgattaatttcatttagcagggaagtggaataatatcttttgaaataactaagtccactaaattatacagtatgctattctggttctaagtacatattagtcccttggcaaatctgttctttcaaagcataccttccccaaatgagcctacctacttcttaaaaaacatataacacaatgtggtagtagtaggtgtaaggaaggtaagttttttcatagtggtatgcaaacatatcattgaaatattacatagatataaagacttagggaataaaaatagcagcaacaaatacttgatagatttatcctacttgggagaaatattttgtagcagagtatttagtatacttagaagttgatttagcaattaggctttaatgaccttacaaagtgaacataactgaacacaagtattttttcaatgcaagatgaggatgaaaattttacatttcaacccatctggctaaagttaagacttagcaaaaattaaaatgttgcctttgtccaagtatagattaaggcaacaaacatatttgggtgtgtaatttgaagttttggactgaaatatctttgcaagtatccacataaaattctgtaatgccttataattatattctaataattatgcattatactaagacaccattaagaacagttgaggcactacactaaatcaaaccataaatgaggaaaaaacttttaatgttcttttctagaagtgttcaaataggtcttgatatgaagctaaaagccttatttatattatcttaatatttcggctaaaatgttaagctccataacatgaattgatacaattccaattttatcaatattttgtgatagaaaaatgttaatattattcatgagctatacagtccttacattttttcccttggtgtaggaacaacggaggagtttctcctctgctaactattcatatatgtaactgtaacaaaagtgtactatgttatgcacacattacaaataatataaggggaagttttattagcttagtaggaaattgttattattaaggtttaaaaatgagaacaggtgtgagttttccaaaatacttaaaaataatagtgtcaaaaattcaggggcagttaaggagtcatggatggaactagaggtcactatattaagtgacataagccagaaacagacaaacattgcatgttctcaattatttgcgggatctaaaagtcaaaacaattgaactcatggatatagagagtagaaggatggttactagtggctgggaaaaggggtgtgcgaggggaactggggatgcttaatgtgtacaaaaactatgtagttagaaagtataaataagacctagtatttgatagcacaaccgggtgagtatagtcaataatagcttaattgtacaaataactaagagtataattggattgtttgtaacacaaataaatacttgagtggatggata

SEQ ID NO: 820 - DNA, 1906 bp, Homo sapiens
ggtggctccattttccatttgagctcaaatattttgctgcttcctctgtagctgccagacctgctcttgctgctgctcaggtagaacatctgggaggtcccttgctgaccactggaagaagatgagctcgagctattggagtgagacgagcagcagcagctgtggaacccagcagctcccagaggtgctgcagtgccagccccagcattaccactgctaccatcagtcaagccaagcccagcagcctccagaaaaaaatgtagtgtatgagcgagtgaggacctacagtgggcccatgaacaaggtggtgcaggccttggaccccttcaactcacgggaagtgctctcccctctcaaaaccacctcctcctaccaaaatttggtttggagcgaccattctcaggaactccattctccaactttaaaaatatctacatgtgccccaagtactctacatataacccaaaatactgaacaggaacttcattctccaacagtgaaacttactacatatccacagaccactattaggaaatatgtagtacaaaatcctgaacaggaaccactgtctcaattcctaagaggaagccatttcttcccaggaaacaatgttatttatgaaaaaacaataagaaaagtggagaagctaaatactgatcaggggtgccatcctcaggctcaatgccatcatcacattatccaacagccccaggtcatccactctgcacactggcaacaacctgattctagccagcaaatccaagccatcacaggaaataatccaatttctacacatattggaaatgaactgtgccatagtggatcaagccagatttgtgagcaggtgataattcaggatgatggccctgaaaaattggaccccagatattttggagagttgcttgctgatctgagccgtaagaatacggatctatatcactgcttattagaacatttgcagagaattggaggaagcaaacaggactttgagtctacagatgagtcggaagacattgaatcattgattcctaaaggattatcagagtttacaaaacagcaaatacgctacattctgcagatgaggggtatgtctgataagtcactccgactagtgctgtccacatttagcaacatacgggaggagcttggacatcttcaaaatgatttgacatcactggaaaatgacaagatgagacttgagaaagatttatcattcaaagacactcaattaaaagagtacgaagaactcttggcatcagtgagagcaaataatcaccagcagcagcaaggacttcaagactcaagttcaaaatgccaggcattggaagaaaacaatctctctcttcgacatacactatcagacatggaatacagactaaaagaactggaatattgtaaacgtaatttagagcaagagaatcaaaaccttagaatgcaggtttctgagacttgcacaggcccaatgttgcaggctaaaatggatgagattggcaaccactacacggagatggtaaaaaacttgagaatggagaaagatagagagatctgcagactgaggtcccaattaaaccagtaccataaagatgtttcaaagagagaaggaagttgtagtgacttccaatttaagcttcatgaactgacaagcttgctggaagagaaggattccctcataaagcgtcagtcagaggaactctccaagttgcggcaagaaatatattcctctcataaccaaccctccactggtggaaggactactattaccactaaaaagtacaggacacaatatccaatcctaggcctcctatatgatgactacgaatatataccaccaggtagtgaaacacagactattgtgattgagaaaacagaagacaaatacacttgtgtaagttcacttgggcatttt

SEQ ID NO: 821 - DNA, 856 bp, Homo sapiens
aggtgatcagtgggacgagtaaggaaggggggttgggagaggggcgattgggcaacccggctgcacaaacacgggaggtcaaagattgcgcccagcccgcccaggccgggaatggaataaagggacgcggggcgccggaggctgcacagaagcgagtccgactgtgctcgctgctcagcgccgcacccggaggatgaggctcgccgtgggagccctgctggtctgcgccgtcctggggctgtgtctggctgtccctgataaaactgtgagatggtgtgcagtgtcggagcatgaggccactaagtgccagagtttccgcgaccatatgaaaagcgtcattccatccgatggtcccagctgttgctgtggtgaagaaggatagtggcttccagatgaaccagcttcgaggcaagaagtcctgccacacgggtctaggcaggtccgctgggtggaacatccccataggcttactttactgtgacttacctgagccacgtaaacctcttgagaaagcagtggccaatttcttctcgggcagctgtgccccttgtgcggatgggacggacttcccccagctgtgtcaactgtgtccagggtgtggctgctccacccttaaccaatacttcggctactcgggagccttcaagtgtctgaaggatggtgctggggatgtggcctttgtcaagcactcgactatatttgagaacttggcaaacaaggctgacagggaccagtatgagctgctttgcctggacaacacccggaagccggtagatgaatacaaggactgccacttggcccaggtcccttctcataccgtcgtggcccgaagtatgggcggcaaggaggacttgat

SEQ ID NO: 822 - DNA, 2770 bp, Homo sapiens
tgacaatggctgcattgtgcttcatgtcccttcccatcaacatttctgtgctggactccttccactcgcgggtcgtctccagagctcagaaaatgaggtgatcagtgggacgagtaaggaaggggggttgggagaggggcgattgggcaacccggctgcacaaacacgggaggtcaaagattgcgcccagcccgcccaggccgggaatggaataaagggacgcggggcgccggaggctgcacagaagcgagtccgactgtgctcgctgctcagcgccgcacccggaggatgaggctcgccgtgggagccctgctggtctgcgccgtcctggggctgtgtctggctgtccctgataaaactgtgagatggtgtgcagtgtcggagcatgaggccactaagtgccagagtttccgcgaccatatgaaaagcgtcattccatccgatggtcccagtgttgcttgtgtgaagaaagcctcctaccttgattgcatcagggccattgcggcaaacgaagcggatgctgtgacactggatgcaggtttggtgtatgatgcttacctggctcccaataacctgaagcctgtggtggcagagttctatgggtcaaaagaggatccacagactttctattatgctgttgctgtggtgaagaaggatagtggcttccagatgaaccagcttcgaggcaagaagtcctgccacacgggtctaggcaggtccgctgggtggaacatccccataggcttactttactgtgacttacctgagccacgtaaacctcttgagaaagcagtggccaatttcttctcgggcagctgtgccccttgtgcggatgggacggacttcccccagctgtgtcaactgtgtccagggtgtggctgctccacccttaaccaatacttcggctactcgggagccttcaagtgtctgaaggatggtgctggggatgtggcctttgtcaagcactcgactatatttgagaacttggcaaacaaggctgacagggaccagtatgagctgctttgcctggacaacacccggaagccggtagatgaatacaaggactgccacttggcccaggtcccttctcataccgtcgtggcccgaagtatgggcggcaaggaggacttgatctgggagcttctcaaccaggcccaggaacattttggcaaagacaaatcaaaagaattccaactattcagctctcctcatgggaaggacctgctgtttaaggactctgcccacgggtttttaaaagtcccccccaggatggatgccaagatgtacctgggctatgagtatgtcactgccatccggaatctacgggaaggcacatgcccagaagccccaacagatgaatgcaagcctgtgaagtggtgtgcgctgagccaccacgagaggctcaagtgtgatgagtggagtgttaacagtgtagggaaaatagagtgtgtatcagcagagaccaccgaagactgcatcgccaagatcatgaatggagaagctgatgccatgagcttggatggagggtttgtctacatagcgggcaagtgtggtctggtgcctgtcttggcagaaaactacaataagagcgataattgtgaggatacaccagaggcagggtattttgctgtagcagtggtgaagaaatcagcttctgacctcacctgggacaatctgaaaggcaagaagtcctgccatacggcagttggcagaaccgctggctggaacatccccatgggcctgctctacaataagatcaaccactgcagatttgatgaatttttcagtgaaggttgtgcccctgggtctaagaaagactccagtctctgtaagctgtgtatgggctcaggcctaaacctgtgtgaacccaacaacaaagagggatactacggctacacaggcgctttcaggtgtctggttgagaagggagatgtggcctttgtgaaacaccagactgtcccacagaacactgggggaaaaaaccctgatccatgggctaagaatctgaatgaaaaagactatgagttgctgtgccttgatggtaccaggaaacctgtggaggagtatgcgaactgccacctggccagagccccgaatcacgctgtggtcacacggaaagataaggaagcttgcgtccacaagatattacgtcaacagcagcacctatttggaagcaacgtaactgactgctcgggcaacttttgtttgttccggtcggaaaccaaggaccttctgttcagagatgacacagtatgtttggccaaacttcatgacagaaacacatatgaaaaatacttaggagaagaatatgtcaaggctgttggtaacctgagaaaatgctccacctcatcactcctggaagcctgcactttccgtagaccttaaaatctcagaggtagggctgccaccaaggtgaagatgggaacgcagatgatccatgagtttgccctggtttcactggcccaagtggtttgtgctaaccacgtctgtcttcacagctctgtgttgccatgtgtgctgaacaaaaaataaaaattattattgattttatatttcaaaaactccattctttcctaaatattttcaacaaaggatttctttatgcattctgcctaaatacctatgcaactgagcccttccttctcagctcaagattcgtctggtctttccctacagctttgtgtgtgccatggccacatctcctgggtacagttcaaggagacatcttttctaaaagggtctgcgtgatcattaaaatataatcaaatgt

SEQ ID NO: 823 - DNA, 2298 bp, Homo sapiens
tgtgctcgctgctcagcgcgcacccggaagatgaggctcgccgtgggagccctgctggtctgcgccgtcctggggctgtgtctggctgtccctgataaaactgtgagatggtgtgcagtgtcggagcatgaggccactaagtgccagagtttccgcgaccatatgaaaagcgtcattccatccgatggtcccagtgttgcttgtgtgaagaaagcctcctaccttgattgcatcagggccattgcggcaaacgaagcggatgctgtgacactggatgcaggtttggtgtatgatgcttacttggctcccaataacctgaagcctgtggtggcagagttctatgggtcaaaagaggatccacagactttctattatgctgttgctgtggtgaagaaggatagtggcttccagatgaaccagcttcgaggcaagaagtcctgccacacgggtctaggcaggtccgctgggtggaacatccccataggcttactttactgtgacttacctgagccacgtaaacctcttgagaaagcagtggccaatttcttctcgggcagctgtgccccttgtgcggatgggacggacttcccccagctgtgtcaactgtgtccagggtgtggctgctccacccttaaccaatacttcggctactcgggagccttcaagtgtctgaaggatggtgctggggatgtggcctttgtcaagcactcgactatatttgagaacttggcaaacaaggctgacagggaccagtatgagctgctttgcctagacaacacccggaagccggtagatgaatacaaggactgccacttggcccaggtcccttctcataccgtcgtggcccgaagtatgggcggcaaggaggacttgatctgggagcttctcaaccaggcccaggaacattttggcaaagacaaatcaaaagaattccaactattcagctctcctcatgggaaggacctgctgtttaaggactctgcccacgggtttttaaaagtccccccaaggatggatgccaagatgtacctgggctatgagtatgtcactgccatccggaatctacgggaaggcacatgcccagaagccccaacagatgaatgcaagcctgtgaagtggtgtgcgctgagccaccacgagaggctcaagtgtgatgagtggagtgttaacagtgtagggaaaatagagtgtgtatcagcagagaccaccgaagactgcatcgccaagatcatgaatggagaagctgatgccatgagcttggatggagggtttgtctacatagcgggcaagtgtggtctggtgcctgtcttggcagaaaactacaataagagcgataattgtgaggatacaccagaggcagggtattttgctgtagcagtggtgaagaaatcagcttctgacctcacctgggacaatctgaaaggcaagaagtcctgccatacggcagttggcagaaccgctggctggaacatccccatgggcctgctctacaataagatcaaccactgcagatttgatgaatttttcagtgaaggttgtgcccctgggtctaagaaagactccagtctctgtaagctgtgtatgggctcaggcctaaacctgtgtgaacccaacaacaaagagggatactacggctacacaggcgctttcaggtgtctggttgagaagggagatgtggcctttgtgaaacaccagactgtcccacagaacactgggggaaaaaaccctgatccatgggctaagaatctgaatgaaaaagactatgagttgctgtgccttgatggtaccaggaaacctgtggaggagtatgcgaactgccacctggccagagccccgaatcacgctgtggtcacacggaaagataaggaagcttgcgtccacaagatattacgtcaacagcagcacctatttggaagcaacgtaactgactgctcgggcaacttttgtttgttccggtcggaaaccaaggaccttctgttcagagatgacacagtatgtttggccaaacttcatgacagaaacacatatgaaaaatacttaggagaagaatatgtcaaggctgttggtaacctgagaaaatgctccacctcatcactcctggaagcctgcactttccgtagaccttaaaatctcagaggtagggctgccaccaaggtgaagatgggaacgcagatgatccatgagtttgccctggtttcactggcccaagtggtttgtgctaaccacgtctgtcttcacagctctgtgttgccatgtgtgctgaacaaaaaataaaaattattattgattttatatttc

SEQ ID NO: 824 - DNA, 2344 bp, Homo sapiens
cgactgtgctcgctgctcagcgccgcacccggaggatgaggctcgccgtgggagccctgctggtctgcgccgtcctgggcaaacgaagcggatgctgtgacactggatgcaggtttggtgtatgatgcttacctggctcccaataacctgaagcctgtggtggcagagttctatgggtcaaaagaggatccacagactttctattatgctgttgctgtggtgaagaaggatagtggcttccagatgaaccagcttcgaggcaagaagtcctgccacacgggtctaggcaggtccgctgggtggaacatccccataggcttactttactgtgacttacctgagccacgtaaacctcttgagaaagcagtggccaatttcttctcgggcagctgtgccccttgtgcggatgggacggacttcccccagctgtgtcaactgtgtccagggtgtggctgctccacccttaaccaatacttcggctactcgggagccttcaagtgtctgaaggatggtgctggggatgtggcctttgtcaagcactcgactatatttgagaacttggcaaacaaggctgacagggaccagtatgagctgctttgcctggacaacacccggaagccggtagatgaatacaaggactgccacttggcccaggtcccttctcataccgtcgtggcccgaagtatgggcggcaaggaggacttgatctgggagcttctcaaccaggcccaggaacattttggcaaagacaaatcaaaagaattccaactattcagctctcctcatgggaaggacctgctgtttaaggactctgcccacgggtttttaaaagtcccccccaggatggatgccaagatgtacctgggctatgagtatgtcactgccatccggaatctacgggaaggcacatgcccagaagccccaacagatgaatgcaagcctgtgaagtggtgtgcgctgagccaccacgagaggctcaagtgtgatgagtggagtgttaacagtgtagggaaaatagagtgtgtatcagcagagaccaccgaagactgcatcgccaagatcatgaatggagaagctgatgccatgagcttggatggagggtttgtctacatagcgggcaagtgtggtctggtgcctgtcttggcagaaaactacaataagagcgataattgtgaggatacaccagaggcagggtattttgctgtagcagtggtgaagaaatcagcttctgacctcacctgggacaatctgaaaggcaagaagtcctgccatacggcagttggcagaaccgctggctggaacatccccatgggcctgctctacaataagatcaaccactgcagatttgatgaatttttcagtgaaggttgtgcccctgggtctaagaaagactccagtctctgtaagctgtgtatgggctcaggcctaaacctgtgtgaacccaacaacaaagagggatactacggctacacaggcgctttcaggtgtctggttgagaagggagatgtggcctttgtgaaacaccagactgtcccacagaacactgggggaaaaaaccctgatccatgggctaagaatctgaatgaaaaagactatgagttgctgtgccttgatggtaccaggaaacctgtggaggagtatgcgaactgccacctggccagagccccgaatcacgctgtggtcacacggaaagataaggaagcttgcgtccacaagatattacgtcaacagcagcacctatttggaagcaacgtaactgactgctcgggcaacttttgtttgttccggtcggaaaccaaggaccttctgttcagagatgacacagtatgtttggccaaacttcatgacagaaacacatatgaaaaatacttaggagaagaatatgtcaaggctgttggtaacctgagaaaatgctccacctcatcactcctggaagcctgcactttccgtagaccttaaaatctcagaggtagggctgccaccaaggtgaagatgggaacgcagatgatccatgagtttgccctggtttcactggcccaagtggtttgtgctaaccacgtctgtcttcacagctctgtgttgccatgtgtgctgaacaaaaaataaaaattattattgattttatatttcaaaaactccattctttcctaaatattttcaacaaaggatttctttatgcattctgcctaaatacctatgcaactgagcccttccttctcagctcaagattcgtctggtctttccctacagctttgtgtgtgccatggccacatctcctgggtacagttcaaggagacatcttttctaaaagggtctgcgtgatcattaaaatataatcaaatgt

SEQ ID NO: 825 - DNA, 2526 bp, Homo sapiens
cagccaccgcgacggagcccgcaggcgggaacctgcctccgcgcgttagcgcgcacgcgcgcctcatgtgtcgtccccatcagcgccggcttccgtctataggccagatgcactgtcactctggcgaagtcgcagacccgattggccgggacggaggcgcgagaccgggttgcgggcggggccgaacgtggtataaaaggggcgggaggccaggctcgtgccgttttgcagacgccaccgccgaggaaaaccgtgtactattagccatggtcaaccccaccgtgttcttcgacattgccgtcgacggcgagcccttgggccgcgtctcctttgaggtaaggggcctggataccaagaagtgactgctcatctaatccataaagctatgttaacagattggagctgtttgcagacaaggtcccaaagacagcagaaaattttcgtgctctgagcactggagagaaaggatttggttataagggttcctgctttcacagaattattccagggtttatgtgtcagggtggtgacttcacacgccataatggcactggtggcaagtccatctatggggagaaatttgaagatgagaacttcatcctaaagcatacgggtcctggcatcttgtccatggcaaatgctggacccaacacaaatggttcccagtttttcatctgcactgccaagactgagtggttggatggcaagcatgtggtgtttggcaaagtgaaagaaggcatgaatattgtggaggccatggagcgctttgggtccaggaatggcaagaccagcaagaagatcaccattgctgactgtggacaactcgaataagtttgacttgtgttttatcttaaccaccagatcattccttctgtagctcaggagagcacccctccaccccatttgctcgcagtatcctagaatctttgtgctctcgctgcagttccctttgggttccatgttttccttgttccctcccatgcctagctggattgcagagttaagtttatgattatgaaataaaaactaaataacaattgtcctcgtttgagttaagtgttgatgtaggctttattttaagcagtaatgggttacttctgaaacatcacttgtttgcttaattctacacagtacttagattttttttactttccagtcccaggaagtgtcaatgtttgttgagtggaatattgaaaatgtaggcagcaactgggcatggtggctcactgtctgtaatgtattacctgaggcagaagaccacctgagggtaggagtcaagatcagcctgggcaacatagtgagacgctgtctctacaaaaaataattagcctggcctggtggtgcatgcctagtcctagctgatctggaggctgacgtgggaggattgcttgagcctagagtgagctattatcatgccactgtacagcctgggtgttcacagatcttgtgtctccaaggtaggcagaggcaggaaaagcaaggagccagaattaagaggttgggtcagtctgcagtgagttcatgcatttagaggtgttcttcaagatgactaatgtcaaaaattgagacatctgttgcggttcttttttttttttttttttcccctggaatgcagtggcgtgatctcagctcactgcagcctccgcctcctgggttcaagtgattctagtgcctcagcctcctgagtagctgggataacgggcgtgtgccaccatgcccagctaatttttgtatttttagtatagatggggtttcatcattttgaccaggctggtctcaaactcttgacctcagctgatgcgcctgccttggcctcccaaactgctgagattacagatgtgagccaccgcaccctacctcattttctgtaacaaagctaagcttgaacactgttgatgttcttgagggaagcatattgggctttaggctgtaggtcaagtttatacatcttaattatggtggaattcctatgtagagtctaaaaagccaggtacttggtgctacagtcagtctccctgcagagggttaaggcgcagactacctgcagtgaggaggtactgcttgtagcatatagagcctctccctagctttggttatggaggctttgaggttttgcaaacctgaccaatttaagccataagatctggtcaaagggatacccttcccactaaggacttggtttctcaggaaattatatgtacagtgcttgctggcagttagatgtcaggacagtctaagctgagaaaaccccttctctgcccaccttaacagacctctagggttcttaacccagcaatcaagtttgcctatcctagaggtggcggatttgatcatttggtgtgttgggcaatttttgttttactgtctggttccttctgcgtgaattaccaccaccaccacttgtgcatctcagtcttgtgtgttgtctggttacgtattccctgggtgataccattcaatgtcttaatgtacttgtggctcagacctgagtgcaaggtggaaataaacatcaaacatcttttcatt

SEQ ID NO: 826 - DNA, 745 bp, Homo sapiens
gcagacgctgccgccaccaggagccctgtagtatcagccatagtcaatcccacggtgttcttcaacattgccatcaatggtgagcccttgggctgcatctcctttgagctgtttgcagacaagtttccaaagacagcagaaaaccttcgtgttctgggcatgggagagaaaggatttggttgtaagggctcccgctttcacagaattattccagggtttatgtgtcagggtggtgacttcacacgccataatggcactggtggcaagtccatctatggggagaaatttgatgatgagaacttcatcctaaagcatacaggtcctggcatcttgtccatggcaaatgctggacccaacacaaacggttcccagtttttcatctgcactgccaagagtgagtggttggatggcaagcatgtggtctttggcaagatgaaagaaggcataaatattgtggaggccacggggcgctttgggtccaggaatggaaagaccagcaagaaaatcaccattgctgactgtggacaacttgaataagtttgacttgtgttttatcttaaccaccagacccttccttttgtagctcaggagagcaccctccaccccatttgcttgcagtatcctagaatctttgtgctcttgctgcagttccctttgggttccatgttttccttgttccctatgcctagctgaattgaagagttgagttaagtttatgattatgaaattaaaactaaataactat

SEQ ID NO: 827 - DNA, 744 bp, Homo sapiens
cagacgctgctgccgaggaaaaccttgtattattaggcatggtcaaccccaccgtgttcttcgacattgccatcgacggcgagcccttgggccgcgtctccttttagctgtttgcagacaagttcccaaagacagcagaaaattttcgtgctctgagcactggagagaaaggatttagttataagggttcctgctttcacagaattattctagggtttatgtatcagggtcgtgacttcacacgccataatggcactggtggcaagtccatctatggggagaaatttgaagatgagaacttcatcctaaagcatacaggtcctggcatcttgtccatggcaaatgctggacccaacacaaatggttcccagtttttcatctgcactgccaagactgagtggttggatggcaagcatgtggtctttggcaaagtgaaagaaggcatgaatattatggaggccatggagcgctttgggtccaggaatggcaagaccagcaagaagatcaccattgctgactgtggacaactcgaataagtttgacttgtgttttatcttaaccaccagaccattccttctgtagttcaggagaacacccttccaccccatttgctcgcagtatcctagaatctttgtgctcttgctgcagttccatgttttccttgttccctcccatgcctagctggattgcagagttaagtttatgattatgaaataaaaaccaaataacaaaaaaacaagaaaa

SEQ ID NO: 828 - DNA, 765 bp, Homo sapiens
gtgctctgcggacgccaccgctgaggaaaaccgtgtactattagccatggtcaaccccaccatgttctttgaatttgccgtcgacagcgagcccttgggccatgtctccttcgagctgtttgcagacaagatcccaaagacagcagaaaattttcgtgctccgagcactggagagaaaggatttggttataaggtttcctgctttcacagaattattccagggtttatgtgtcagggtggtgactgtgaagtcaccataatggcactggtggcaagtccatctacacggagaaatttgaagatgagaacttcatcctaaagcatacaggtcctggcatcttgtccatggcaaatgctggacccaacacaaatggttcccagtttttcatctgcactgccaagagtgagtggttggatggcaagcacgtgctctttggcaaagtgaaagaaggcacgaatattgtggaggcatggagtgctttgggtccaggaatggcaagaccagcaagaagatcaccattgctgactgtggacaactcgaataagtttgacttgtgttttatcttaaccaccagaccattccttccgtagctcaggagagcacccctccaccccgtttgctcgcagtatcctagaatctttgtgctctcgctgcagttccctttgggttccatgttttccttgttccctcccatgcctagatggattgcagagttaagtttatgattatgaaataaaaactaaataacaacaacaaaaaagaaa

SEQ ID NO: 829 - DNA, 498 bp, Homo sapiens
atggtcaaccccaccgtgttcttcgacattgccgtcgacggcgagcctttgggccgcgtctccttcgagctgtttgcagacaaggttccaaagacagcagaaaattttcgtgctctgagcactggagagaaaggatttggttataagggttcctgctttcacagaattattccagggtttatgtgtcagggtggtgacttcacacgccataatggcactggtggcaagtccatctatggggagaaatttgaagatgagaacttcatcctaaagcatacaggtcctggcatcttgtccatggcaaatgctggacccaacacaaatggttcccagtttttcatctgcactgccaagactgagtggttggatggcaagcatgtggtctttggcaaagtgaaagaaggcatgaatattgtggaggccatggagcgctttgggtccaggaatggcaagaccagcaagaagatcaccattgctgactgtggacaactcgaataa

SEQ ID NO: 830 - DNA, 774 bp, Homo sapiens
acttggctttgcagacgccgccgccgaggaaaaccgtgtactattagccatggtcaaccccaccgtgttcttcgacattgccgtcgacggcgagcccttgggccgcgtctcctttgagctatttgcagacaaggtcccaaagacagcagaaaattttcgtgctctgagcactggagagaaaggatttggttataagggttcctgctttcacagaattattccagggtttatgtgtcagggtggtgacttcacacgccataatggcactggtggcaagtccatctatggggagaaatttgaagatgagaacttcatcctaaagcatacaggtcctggcatcttgtccatggcaaatgctggacccaacacaaatggatcccagtttttcatctgcactgccaagactgagtggttggatggcaagcatgtggtgtttggcaaagtgaaagaaggcatgaatattgtggaggccatggagcgctttgggtccaggaatggcaagaccagcaagaagatcaccattgctgactgtggacaactcgaataagtttgacttgtgttttatcttaaccaccaggtcattccttctgtagctcaggagagcacccctccaccccatttgctcgcagtatcctagaatctttgtgctctcgctgcagttccctttgggttccatgttttccttgttccctcccatgcctagctggattgcagagttaagtttatgattatgaaataaaaactaaataacaaacaaaaaaaaagaagcaatta

SEQ ID NO: 831 - DNA, 755 bp, Homo sapiens
ttaaaaaaaacaaaaacaggctttgcagacgccacagccactggcaggagccctgtactatcagccatggttaaccccaccatgttctttgacatcgccgcgagcccttagactgtgtctccttcgagctgtttgcagacaaagtttcaaagacagcagaaaactttcgtgctctgagcactggagagaaaggatttggttgtaagggttcctgctttcacagaattattccagggtttatgtgtcagggtggtgacttcacatgccataatggcactggtggcaagtccatctactgggagaaatttgatgatgagaacttcatcctaaagcatacaggtcctggcatcttatccatggcaaatgctggacccaacacaaatggttcccagtttttcatctgcactgccaagactaagtggttggatggcaagcatgtggcctttggcaaggtgaaagaaggcatgaatattgtggaggccatggagggtccaggaatggcaagaccagcaagaagatcaccattgctgactgtggacaactctaataagtttgacttgtgttttatcttaacctccagaccattccttctgtaactcaggagagcatccttccacccaatttgctcgcagtatcctagaatctttgtgctctcactgcagttccctttgggtgccatgttttccttgttcccttccatgcccagctggattgcagagttaagtttatgattatgaaataaaaactaaatgcca

SEQ ID NO: 832 - DNA, 2561 bp, Homo sapiens
cagccaccgcgacggagcccgcaggcgggaacctgcctccgcgcgttagcgcgcacgcgcgcctcatgtgtcgtccccatcagcgccggcttccgtctataggccagatgcactgtcactctggcgaagtcgcagacccgattggccgggacggaggcgcgagaccgggttgcgggcggggccgaacgtggtataaaaggggcgggaggccaggctcgtgccgttttgcagacgccaccgccgaggaaaaccgtgtactattagccatggtcaaccccaccgtgttcttcgacattgccgtcgacggcgagcccttgggccgcgtctcctttgagtgacggcgctggcgggggaggcgctcttgagcccctcccgattgtccctctgcctagcaagcaagttgcgactggccacaaggcaggcctcttccgaccaagctgtttgcagacaaggtcccaaagacagcagaaaattttcgtgctctgagcactggagagaaaggatttggttataagggttcctgctttcacagaattattccagggtttatgtgtcagggtggtgacttcacacgccataatggcactggtggcaagtccatctatggggagaaatttgaagatgagaacttcatcctaaagcatacgggtcctggcatcttgtccatggcaaatgctggacccaacacaaatggttcccagtttttcatctgcactgccaagactgagtggttggatggcaagcatgtggtgtttggcaaagtgaaagaaggcatgaatattgtggaggccatggagcgctttgggtccaggaatggcaagaccagcaagaagatcaccattgctgactgtggacaactcgaataagtttgacttgtgttttatcttaaccaccagatcattccttctgtagctcaggagagcacccctccaccccatttgctcgcagtatcctagaatctttgtgctctcgctgcagttccctttgggttccatgttttccttgttccctcccatgcctagctggattgcagagttaagtttatgattatgaaataaaaactaaataacaattgtcctcgtttgagttaagtgttgatgtaggctttattttaagcagtaatgggttacttctgaaacatcacttgtttgcttaattctacacagtacttagattttttttactttccagtcccaggaagtgtcaatgtttgttgagtggaatattgaaaatgtaggcagcaactgggcatggtggctcactgtctgtaatgtattacctgaggcagaagaccacctgagggtaggagtcaagatcagcctgggcaacatagtgagacgctgtctctacaaaaaataattagcctggcctggtggtgcatgcctagtcctagctgatctggaggctgacgtgggaggattgcttgagcctagagtgagctattatcatgccactgtacagcctgggtgttcacagatcttgtgtctccaaggtaggcagaggcaggaaaagcaaggagccagaattaagaggttgggtcagtctgcagtgagttcatgcatttagaggtgttcttcaagatgactaatgtcaaaaattgagacatctgttgcggttcttttttttttttttttttcccctggaatgcagtggcgtgatctcagctcactgcagcctccgcctcctgggttcaagtgattctagtgcctcagcctcctgagtagctgggataacgggcgtgtgccaccatgcccagctaatttttgtatttttagtatagatggggtttcatcattttgaccaggctggtctcaaactcttgacctcagctgatgcgcctgccttggcctcccaaactgctgagattacagatgtgagccaccgcaccctacctcattttctgtaacaaagctaagcttgaacactgttgatgttcttgagggaagcatattgggctttaggctgtaggtcaagtttatacatcttaattatggtggaattcctatgtagagtctaaaaagccaggtacttggtgctacagtcagtctccctgcagagggttaaggcgcagactacctgcagtgaggaggtactgcttgtagcatatagagcctctccctagctttggttatggaggctttgaggttttgcaaacctgaccaatttaagccataagatctggtcaaagggatacccttcccactaaggacttggtttctcaggaaattatatgtacagtgcttgctggcagttagatgtcaggacagtctaagctgagaaaaccccttctctgcccaccttaacagacctctagggttcttaacccagcaatcaagtttgcctatcctagaggtggcggatttgatcatttggtgtgttgggcaatttttgttttactgtctggttccttctgcgtgaattaccaccaccaccacttgtgcatctcagtcttgtgtgttgtctggttacgtattccctgggtgataccattcaatgtcttaatgtacttgtggctcagacctgagtgcaaggtggaaataaacatcaaacatcttttcatt

SEQ ID NO: 833 - DNA, 540 bp, Homo sapiens
atgagcggagtgtgggaaggaaggagccctgtagtatcagccatagtcaatcccacggtgttcttcaacattgccatcaatggtgagcccttgggctgcatctcctttgagctgtttgcagacaagtttccaaagacagcagaaaaccttcgtgttctgggcatgggagagaaaggatttggttgtaagggctcccgctttcacagaattattccagggtttatgtgtcagggtggtgacttcacacgccataatggcactggtggcaagtccatctatggggagaaatttgatgatgagaacttcatcctaaagcatacaggtcctggcatcttgtccatggcaaatgctggacccaacacaaacggttcccagtttttcatctgcactgccaagagtgagtggttggatggcaagcatgtggtctttggcaagatgaaagaaggcataaatattgtggaggccacggggcgctttgggtccaggaatggaaagaccagcaagaaaatcaccattgctgactgtggacaacttgaataa

SEQ ID NO: 834 - DNA, 665 bp, Homo sapiens
atgaggaggcagcccttagactgtgtctccttcgagctgtttgcagacaaagtttcaaagacagcagaaaactttcgtgctctgagcactggagagaaaggatttggttgtaagggttcctgctttcacagaattattccagggtttatgtgtcagggtggtgacttcacatgccataatggcactggtggcaagtccatctactgggagaaatttgatgatgagaacttcatcctaaagcatacaggtcctggcatcttatccatggcaaatgctggacccaacacaaatggttcccagtttttcatctgcactgccaagactaagtggttggatggcaagcatgtggcctttggcaaggtgaaagaaggcatgaatattgtggaggccatggagggtccaggaatggcaagaccagcaagaagatcaccattgctgactgtggacaactctaataagtttgacttgtgttttatcttaacctccagaccattccttctgtaactcaggagagcatccttccacccaatttgctcgcagtatcctagaatctttgtgctctcactgcagttccctttgggtgccatgttttccttgttcccttccatgcccagctggattgcagagttaagtttatgattatgaaataaaaactaaatgccaaa

SEQ ID NO: 835 - DNA, 719 bp, Homo sapiens
atgccaccgccgctgggagccctgtactatcagccatggtcaaccccactgttcttcaacattgctgacgaaggcaagcccttgggccgcgtctccttcaacctgtttgcagacaagattccaaagacagcagaaaactttcatgctctgagcactggcgagaaaggatttggttttaagggtttccgctttcacagaattattccagggtttatgtatcagggtggtgacttcacacccataatggcactggtggcaagtccatttacggggagaaatttggtgatgaaaacttcatcctaaagcatacaggtcctggcatcttgtccatggcaaatgctggacccaacacaaacggttcccagtttttcatctgcactgccaagactgagtggttggatggcaagcatgtggtctgtggcaaggcgaaagaaggcaagaatattgtggaggccatggagcgctgtggttccaggaatggcaagaccagcaagaagatcaccattgctgactgtgaacaactctaataagtttgacttgtgttttatcttaaccaccagaccattccttctgtagctcaggagagcacccctccaccccatttgctctcagtatcctagaatctttgtgctcttgctgcagttccctttgggttccatgttttccttgttcccttccgtgcctagctggattgcagtgttaagtttatgattatgaat

SEQ ID NO: 836 - DNA, 498 bp, Homo sapiens
atggtcaaccccaccgtgttcttccacatctctgtcgacggtgagtccttgggccgcatctcttttgagctgtttgcagacaagtttccaaagacagcagaaaacttttgtgctctgaatactggagagaaaggatttggttacaagggttgctgctttcacagaattattccagggtttatgtgtcatggtggtgacttcacacaccataatggcactggtggcaagtcaatctacggggagaaagttgatgatgacaacttcatcctgaagcatacaggtcctggcatattgtccatggcaaatgctggacccaacacaaatggttcccagtttttcatctgcactgccaagtctgagtggttggatagcaagcatgtggtcattggcaaggtgaaagaaggcatgaatattgtggaggccatggagcactttgggtccaggaatggcaagaccagcaagaaggtcaccattcctgactttggacaactcgaataa

SEQ ID NO: 837 - DNA, 477 bp, Homo sapiens
atgaggagttctaggactcacatatcaggcaccttcttccatgatcatctgtttgcagacaagttcccaaagacagcagaaaattttcgtgctctgagcactggagagaaaggatttagttataagggttcctgctttcacagaattattccagggtttatgtatcagggtcgtgacttcacacgccataatggcactggtggcaagtccatctatggggagaaatttgaagatgagaacttcatcctaaagcatacaggtcctggcatcttgtccatggcaaatgctggacccaacacaaatggttcccagtttttcatctgcactgccaagactgagtggttggatggcaagcatgtggtctttggcaaagtgaaagaaggcatgaatattatggaggccatggagcgctttgggtccaggaatggcaagaccagcaagaagatcaccattgctgactgtggacaactcgaataa

SEQ ID NO: 838 - DNA, 768 bp, Homo sapiens
gcggctttgcagatgacgccgccgaggaaaactgtgtactattagccatggtcaaccccaccgtgttcttcgacattgccgtcgatggcgagcccttgggccgcgtctcctttgagctgttagctgacaaggtcccaaagacagcagaaaattttcatgctctgagcactggagagaaaggatttggttataagggttcctgctttcacagaattattccagggtttatgtgtcagggtggtgacttcacacgccataatggcactagtggcaagtccatctatggggagaaatttgaagatgagaacttcatcctaaagcatacaggtcctggcatcttgtccatggcaaatgctggacccaacacaaatggctcccagtttttcatctgcactgccaagactgagtggttggatggcatgcatgtgatctgtggcaaagtgaaagaaggcatgaatattgtggaggtcatggagtgctttgggtccaggaatggcaagaccagcaagaagatcaccattgctgactgtggacaactcgaataagtttgacttgtgttttatcttaaccaccagaccattccttctgtagctcaggagagcacccctccatcccatttgctcgcagtatcctagaatctttgtgctctcgctgcagttccctttgggttccatgttttccttgttccctcccatgcctagctggattgcagagttaagtttatgattatgaaataaaaactaaataacaaaaaatatatatatataa

SEQ ID NO: 839 - DNA, 2616 bp, Homo sapiens
cagccaccgcgacggagcccgcaggcgggaacctgcctccgcgcgttagcgcgcacgcgcgcctcatgtgtcgtccccatcagcgccggcttccgtctataggccagatgcactgtcactctggcgaagtcgcagacccgattggccgggacggaggcgcgagaccgggttgcgggcggggccgaacgtggtataaaaggggcgggaggccaggctcgtgccgttttgcagacgccaccgccgaggaaaaccgtgtactattagccatggtcaaccccaccgtgttcttcgacattgccgtcgacggcgagcccttgggccgcgtctcctttgaggtaaggggcctggataccaagaagtgactgctcatctaatccataaagctatgttaacagattggaggtagtagcattttcattacaagtgactaaaagaacagctgtttacccctgatcgtgcagcagtgcttgctgttccttagaattttgccttctgtttgcagacaaggtcccaaagacagcagaaaattttcgtgctctgagcactggagagaaaggatttggttataagggttcctgctttcacagaattattccagggtttatgtgtcagggtggtgacttcacacgccataatggcactggtggcaagtccatctatggggagaaatttgaagatgagaacttcatcctaaagcatacgggtcctggcatcttgtccatggcaaatgctggacccaacacaaatggttcccagtttttcatctgcactgccaagactgagtggttggatggcaagcatgtggtgtttggcaaagtgaaagaaggcatgaatattgtggaggccatggagcgctttgggtccaggaatggcaagaccagcaagaagatcaccattgctgactgtggacaactcgaataagtttgacttgtgttttatcttaaccaccagatcattccttctgtagctcaggagagcacccctccaccccatttgctcgcagtatcctagaatctttgtgctctcgctgcagttccctttgggttccatgttttccttgttccctcccatgcctagctggattgcagagttaagtttatgattatgaaataaaaactaaataacaattgtcctcgtttgagttaagtgttgatgtaggctttattttaagcagtaatgggttacttctgaaacatcacttgtttgcttaattctacacagtacttagattttttttactttccagtcccaggaagtgtcaatgtttgttgagtggaatattgaaaatgtaggcagcaactgggcatggtggctcactgtctgtaatgtattacctgaggcagaagaccacctgagggtaggagtcaagatcagcctgggcaacatagtgagacgctgtctctacaaaaaataattagcctggcctggtggtgcatgcctagtcctagctgatctggaggctgacgtgggaggattgcttgagcctagagtgagctattatcatgccactgtacagcctgggtgttcacagatcttgtgtctccaaggtaggcagaggcaggaaaagcaaggagccagaattaagaggttgggtcagtctgcagtgagttcatgcatttagaggtgttcttcaagatgactaatgtcaaaaattgagacatctgttgcggttcttttttttttttttttttcccctggaatgcagtggcgtgatctcagctcactgcagcctccgcctcctgggttcaagtgattctagtgcctcagcctcctgagtagctgggataacgggcgtgtgccaccatgcccagctaatttttgtatttttagtatagatggggtttcatcattttgaccaggctggtctcaaactcttgacctcagctgatgcgcctgccttggcctcccaaactgctgagattacagatgtgagccaccgcaccctacctcattttctgtaacaaagctaagcttgaacactgttgatgttcttgagggaagcatattgggctttaggctgtaggtcaagtttatacatcttaattatggtggaattcctatgtagagtctaaaaagccaggtacttggtgctacagtcagtctccctgcagagggttaaggcgcagactacctgcagtgaggaggtactgcttgtagcatatagagcctctccctagctttggttatggaggctttgaggttttgcaaacctgaccaatttaagccataagatctggtcaaagggatacccttcccactaaggacttggtttctcaggaaattatatgtacagtgcttgctggcagttagatgtcaggacagtctaagctgagaaaaccccttctctgcccaccttaacagacctctagggttcttaacccagcaatcaagtttgcctatcctagaggtggcggatttgatcatttggtgtgttgggcaatttttgttttactgtctggttccttctgcgtgaattaccaccaccaccacttgtgcatctcagtcttgtgtgttgtctggttacgtattccctgggtgataccattcaatgtcttaatgtacttgtggctcagacctgagtgcaaggtggaaataaacatcaaacatcttttcatt

SEQ ID NO: 840 - DNA, 2459 bp, Homo sapiens
cagccaccgcgacggagcccgcaggcgggaacctgcctccgcgcgttagcgcgcacgcgcgcctcatgtgtcgtccccatcagcgccggcttccgtctataggccagatgcactgtcactctggcgaagtcgcagacccgattggccgggacggaggcgcgagaccgggttgcgggcggggccgaacgtggtataaaaggggcgggaggccaggctcgtgccgttttgcagacgccaccgccgaggaaaaccgtgtactattagccatggtcaaccccaccgtgttcttcgacattgccgtcgacggcgagcccttgggccgcgtctcctttgagctgtttgcagacaaggtcccaaagacagcagaaaattttcgtgctctgagcactggagagaaaggatttggttataagggttcctgctttcacagaattattccagggtttatgtgtcagggtggtgacttcacacgccataatggcactggtggcaagtccatctatggggagaaatttgaagatgagaacttcatcctaaagcatacgggtcctggcatcttgtccatggcaaatgctggacccaacacaaatggttcccagtttttcatctgcactgccaagactgagtggttggatggcaagcatgtggtgtttggcaaagtgaaagaaggcatgaatattgtggaggccatggagcgctttgggtccaggaatggcaagaccagcaagaagatcaccattgctgactgtggacaactcgaataagtttgacttgtgttttatcttaaccaccagatcattccttctgtagctcaggagagcacccctccaccccatttgctcgcagtatcctagaatctttgtgctctcgctgcagttccctttgggttccatgttttccttgttccctcccatgcctagctggattgcagagttaagtttatgattatgaaataaaaactaaataacaattgtcctcgtttgagttaagtgttgatgtaggctttattttaagcagtaatgggttacttctgaaacatcacttgtttgcttaattctacacagtacttagattttttttactttccagtcccaggaagtgtcaatgtttgttgagtggaatattgaaaatgtaggcagcaactgggcatggtggctcactgtctgtaatgtattacctgaggcagaagaccacctgagggtaggagtcaagatcagcctgggcaacatagtgagacgctgtctctacaaaaaataattagcctggcctggtggtgcatgcctagtcctagctgatctggaggctgacgtgggaggattgcttgagcctagagtgagctattatcatgccactgtacagcctgggtgttcacagatcttgtgtctccaaggtaggcagaggcaggaaaagcaaggagccagaattaagaggttgggtcagtctgcagtgagttcatgcatttagaggtgttcttcaagatgactaatgtcaaaaattgagacatctgttgcggttcttttttttttttttttttcccctggaatgcagtggcgtgatctcagctcactgcagcctccgcctcctgggttcaagtgattctagtgcctcagcctcctgagtagctgggataacgggcgtgtgccaccatgcccagctaatttttgtatttttagtatagatggggtttcatcattttgaccaggctggtctcaaactcttgacctcagctgatgcgcctgccttggcctcccaaactgctgagattacagatgtgagccaccgcaccctacctcattttctgtaacaaagctaagcttgaacactgttgatgttcttgagggaagcatattgggctttaggctgtaggtcaagtttatacatcttaattatggtggaattcctatgtagagtctaaaaagccaggtacttggtgctacagtcagtctccctgcagagggttaaggcgcagactacctgcagtgaggaggtactgcttgtagcatatagagcctctccctagctttggttatggaggctttgaggttttgcaaacctgaccaatttaagccataagatctggtcaaagggatacccttcccactaaggacttggtttctcaggaaattatatgtacagtgcttgctggcagttagatgtcaggacagtctaagctgagaaaaccccttctctgcccaccttaacagacctctagggttcttaacccagcaatcaagtttgcctatcctagaggtggcggatttgatcatttggtgtgttgggcaatttttgttttactgtctggttccttctgcgtgaattaccaccaccaccacttgtgcatctcagtcttgtgtgttgtctggttacgtattccctgggtgataccattcaatgtcttaatgtacttgtggctcagacctgagtgcaaggtggaaataaacatcaaacatcttttcatt

SEQ ID NO: 841 - DNA, 2579 bp, Homo sapiens
cagccaccgcgacggagcccgcaggcgggaacctgcctccgcgcgttagcgcgcacgcgcgcctcatgtgtcgtccccatcagcgccggcttccgtctataggccagatgcactgtcactctggcgaagtcgcagacccgattggccgggacggaggcgcgagaccgggttgcgggcggggccgaacgtggtataaaaggggcgggaggccaggctcgtgccgttttgcagacgccaccgccgaggaaaaccgtgtactattagccatggtcaaccccaccgtgttcttcgacattgccgtcgacggcgagcccttgggccgcgtctcctttgagctgtttgcagacaaggtcccaaagacagcagaaaattttcgtgctctgagcactggagagaaaggatttggttataagggttcctgctttcacagaattattccagggtttatgtgtcagggtggtgacttcacacgccataatggcactggtggcaagtccatctatggggagaaatttgaagatgagaacttcatcctaaagcatacgggtcctggcatcttgtccatggcaaatgctggacccaacacaaatggttcccagtttttcatctgcactgccaagactgagtgactggatctcgctcttatctcccaggttggagtgcagtggtgccatctcagctcactgcaacctcctcccgggttcaagcaattcttctgcctcagcctctcaagtagctggaactacaggttggatggcaagcatgtggtgtttggcaaagtgaaagaaggcatgaatattgtggaggccatggagcgctttgggtccaggaatggcaagaccagcaagaagatcaccattgctgactgtggacaactcgaataagtttgacttgtgttttatcttaaccaccagatcattccttctgtagctcaggagagcacccctccaccccatttgctcgcagtatcctagaatctttgtgctctcgctgcagttccctttgggttccatgttttccttgttccctcccatgcctagctggattgcagagttaagtttatgattatgaaataaaaactaaataacaattgtcctcgtttgagttaagtgttgatgtaggctttattttaagcagtaatgggttacttctgaaacatcacttgtttgcttaattctacacagtacttagattttttttactttccagtcccaggaagtgtcaatgtttgttgagtggaatattgaaaatgtaggcagcaactgggcatggtggctcactgtctgtaatgtattacctgaggcagaagaccacctgagggtaggagtcaagatcagcctgggcaacatagtgagacgctgtctctacaaaaaataattagcctggcctggtggtgcatgcctagtcctagctgatctggaggctgacgtgggaggattgcttgagcctagagtgagctattatcatgccactgtacagcctgggtgttcacagatcttgtgtctccaaggtaggcagaggcaggaaaagcaaggagccagaattaagaggttgggtcagtctgcagtgagttcatgcatttagaggtgttcttcaagatgactaatgtcaaaaattgagacatctgttgcggttcttttttttttttttttttcccctggaatgcagtggcgtgatctcagctcactgcagcctccgcctcctgggttcaagtgattctagtgcctcagcctcctgagtagctgggataacgggcgtgtgccaccatgcccagctaatttttgtatttttagtatagatggggtttcatcattttgaccaggctggtctcaaactcttgacctcagctgatgcgcctgccttggcctcccaaactgctgagattacagatgtgagccaccgcaccctacctcattttctgtaacaaagctaagcttgaacactgttgatgttcttgagggaagcatattgggctttaggctgtaggtcaagtttatacatcttaattatggtggaattcctatgtagagtctaaaaagccaggtacttggtgctacagtcagtctccctgcagagggttaaggcgcagactacctgcagtgaggaggtactgcttgtagcatatagagcctctccctagctttggttatggaggctttgaggttttgcaaacctgaccaatttaagccataagatctggtcaaagggatacccttcccactaaggacttggtttctcaggaaattatatgtacagtgcttgctggcagttagatgtcaggacagtctaagctgagaaaaccccttctctgcccaccttaacagacctctagggttcttaacccagcaatcaagtttgcctatcctagaggtggcggatttgatcatttggtgtgttgggcaatttttgttttactgtctggttccttctgcgtgaattaccaccaccaccacttgtgcatctcagtcttgtgtgttgtctggttacgtattccctgggtgataccattcaatgtcttaatgtacttgtggctcagacctgagtgcaaggtggaaataaacatcaaacatcttttcatt

SEQ ID NO: 842 - DNA, 4394 bp, Homo sapiens
tcccttctcccctctgggtccagcctcagactgaggcttggagacaggagcattccactcgccacttcggcgcgcccccatgccctcttgtgcgcgtgcgcagaggcggaccgcaaggctagggcgtgagggaagggcgggcgtacgcccttgcgtgcgtctcaggcagcgcgcacgccggcgtgagagggcacggggaaaaggtggctctggccggggtggctcggtttcctggggctatgtaactgagctcgtcgacttaggggtccttcttcgctgccctcgccgcgtgctagcagggagtttccgctcgggagagagactgtcctcacgcccgctgcgcctcctcgacggcagagcaggcttgctcgcccgtgggagcgtcccggccgagaagccctgaggggggaggggaggccattttgtcccgaccgactccccggaaccgggcggagcggctgggagaggctgcggagccgcggtcgccgccctcggaggcactggacgccgccactgtcggggcttcctcaaagctgttcgtaggtcgcccgcgccgtctcgagcctttttcccacgcttccccggtcctccggcctgagaacgcccgagtgaggagttggccgtagtgagagggaccgatcccttggggccgccggcggcgagagcccgagccgctcctcccaatggcgaagaagacgtacgacctgcttttcaagctgctcctgatcggggattccggagtggggaagacctgcgtcctttttcgtttttcggatgatgccttcaatactacctttatttccaccataggaatagacttcaagatcaaaacagttgaattacaaggaaagaagatcaagctacagatatgggatacagcaggccaggagcgatttcacaccatcacaacctcctactacagaggcgcaatgggtatcatgctagtatatgacatcaccaatggtaaaagttttgaaaacatcagcaaatggcttagaaacatagatgagcatgccaatgaagatgtggaaagaatgttactaggaaacaagtgtgatatggacgacaaaagagttgtacctaaaggaaaaggagaacagattgcaagggagcatggtattaggttttttgagactagtgcaaaagcaaatataaacatcgaaaaggcgttcctcacgttagctgaagatatccttcgaaagacccctgtaaaagagcccaacagtgaaaatgtagatatcagcagtggaggaggcgtgacaggctggaagagcaaatgctgctgagcattctcctgttccatcagttgccatccactaccccgttttctcttcttgctgcaaaataaaccactctgtccatttttaactctaaacagatatttttgtttctcatcttaactatccaagccacctattttatttgttctttcatctgtgactgcttgctgactttatcataattttcttcaaacaaaaaaatgtatagaaaaatcatgtctgtgacttcatttttaaatgtacttgctcagctcaactgcatttcagttgtattatagtccagttcttatcaacattaaaacctatagcaatcatttcaaatctattctgcaaattgtataagaataaagttagaattaacaattttattttgtacaacagtggaattttctgtcatggataatgtgcttgagtccctataatctatagacatgtgatagcaaaagaaacaaacaaaagccaggaaaacactcattttcgccttgaatatgtaaatgggattaattttgtcctgtgccttatgtggaaaggaacttctttggttttccttttttgttctggtggaagcatgtgcaggagacatatcatccaaacataaaccattaaaatgtttgtggtttgcttggctgtaattttcaaagtagttaattgaggacaaagggtaatgcagaagtgatagctttggtttgctgagtcttgttttaagtggccttgatatttaaaactattcctgccaccatttcttctccttggccacttcttccttgcgtctccctgcatgctgctttatttgcttctccctccccaaccacctcatggtatatttaagagtgaaagggacaaactagtaggtttgtcaagtttaatataaagcactgatgtaacttgctaggtaaacggaaagataagttctaactgcctactatccaatgtcagttaattggtgtcttcccccctcatttgctctcttccctaaaatgtgtcccagatgccttcatttgctgttttacttctatgttctgcttttcctcctctctttgttcccttcctgtctatccattgagtttatgaaatggaagagttaactgcatgcactagtgtttggagggtgttgtggtttgtctttctaattaggtgtatagcctattcactttcctagaataaatctcttaacctaaatttgagtagtctgcattttggcaactcctctagcagcttggtagcctagtacaggttgtttttttaaaaaaggaaaagcaggaaggaggagtgaattttattaacatgtttgccaaatgtattgagatttggcctctgaagaacactttttcagtgttaagtttctttaccttaagattcagaaatactttagaatattattaattttaagtcctgtctttacatccttttggaaaacttgtattaccatgggtttggaaaaaggacaacgaaaggcttttcatgtaaagataagatctttagctatctctaaccctgtccttttttcactgcattttttctagttttgcttcattgcttatcattaggatagggtaagtgaagtttgctatgctgctagcatcctaagatgatacctttgttgaaagaattgtgaatagcatgattcatttctagcagaggctgagtttaggacagcagcttccattgagaagtctttctgtgtcgtgaatagcattttaatgacctcttggctcacataagcaaacaacatagggacgtatctgctatgaaaatccacaaatttttcagatagtgccctaaaaacaattttatatgcctcactggttgttattcttaggttattcccacacttgactttatcattgtttactactagtaaaaagcagcattgccaaataatccctaattttccactaaaaatataatgaaatgatgttaagctttttgaaaagtttaggttaaacctactgttgttagattaatgtatttgttgcttccctttatctggaatgtggcattagcttttttattttaaccctctttaattcttattcaattccatgacttaaggttggagagctaaacactgggatttttggataacagactgacagttttgcataattataatcggcattgtacatagaaaggatatggctaccttttgttaaatctgcactttctaaatatcaaaaaagggaaatgaagtataaatcaatttttgtataatctgtttgaaacatgagttttatttgcttaatattagggctttgccccttttctgtaagtctcttgggatcctgtgtagaagctgttctcattaaacaccaaacagttaagtccattctctggtactagctacaaattcggtttcatattctacttaacaatttaaataaactgaaatatttctagatggtctacttctgttcatataaaaacaaaacttgatttccagctgtgtggtttggttttcatttatttatggaattggaagattacttctgaaaaaaatgtggaatcgcaaactcaaagagttgacaaaaatgggaaatcactgtcaacctatggaaaactggaaaggcaatttcaagaactgtctttgctgagaaactacattaaaaaatagaattatctctgggatcctaaagcggaatcatccttgtgccaaaataggagatgccacgatcctaatcacacctggcttacactagttggatgtgcctaaggccactacagctgaggtcacctgattcctcagggggaccaagctgggctcctcatactggagggtaaatccttgttttagcagcagctggcctcttactaagaaacaaagtattggccaggtgcggtggctcatgcctgtaatcccagcactttgggaggtcaaggcggacggatcacgaagtcaggagatggagaccatcctggctaacgtggtaaaaccccgtctctattaaaaatacaaaaaaattagccgggcgtggtggcgggcgcctgtagtcccagctactcgggaggctgaggcaggagaatggcgtgaacccgggaggaggaggaggaggctgcagtgagccgagatagcgccactgcactccagcctgggcgacagagcaagactccgtctca

SEQ ID NO: 843 - DNA, 3982 bp, Homo sapiens
tcccttctcccctctgggtccagcctcagactgaggcttggagacaggagcattccactcgccacttcggcgcgcccccatgccctcttgtgcgcgtgcgcagaggcggaccgcaaggctagggcgtgagggaagggcgggcgtacgcccttgcgtgcgtctcaggcagcgcgcacgccggcgtgagagggcacggggaaaaggtggctctggccggggtggctcggtttcctggggctatgtaactgagctcgtcgacttaggggtccttcttcgctgccctcgccgcgtgctagcagggagtttccgctcgggagagagactgtcctcacgcccgctgcgcctcctcgacggcagagcaggcttgctcgcccgtgggagcgtcccggccgagaagccctgaggggggaggggaggccattttgtcccgaccgactccccggaaccgggcggagcggctgggagaggctgcggagccgcggtcgccgccctcggaggcactggacgccgccactgtcggggcttcctcaaagctgttcgtaggtcgcccgcgccgtctcgagcctttttcccacgcttccccggtcctccggcctgagaacgcccgagtgaggagttggccgtagtgagagggaccgatcccttggggccgccggcggcgagagcccgagccgctcctcccaatggcgaagaagacgtacgacctgcttttcaagctgctcctgatcggggattccggagtggggaagacctgcgtcctttttcgtttttcggatgatgccttcaatactacctttatttccaccataggaatagacttcaagatcaaaacagttgaattacaaggaaagaagatcaagctacagatatgggatacagcaggccaggagcgatttcacaccatcacaacctcctactacagaggcgcaatgggtatcatgctagtatatgacatcaccaatggtaaaagttttgaaaacatcagcaaatggcttagaaacatagatgagcatgccaatgaagatgtggaaagaatgttactaggaaacaagtgtgatatggacgacaaaagagttgtacctaaaggaaaaggagaacagattgcaagggagcatggtattaggttttttgagactagtgcaaaagcaaatataaacatcgaaaaggcgttcctcacgttagctgaagatatccttcgaaagacccctgtaaaagagcccaacagtgaaaatgtagatatcagcagtggaggaggcgtgacaggctggaagagcaaatgctgctgagcattctcctgttccatcagttgccatccactaccccgttttctcttcttgctgcaaaataaaccactctgtccatttttaactctaaacagatatttttgtttctcatcttaactatccaagccacctattttatttgttctttcatctgtgactgcttgctgactttatcataattttcttcaaacaaaaaaatgtatagaaaaatcatgtctgtgacttcatttttaaatgtacttgctcagctcaactgcatttcagttgtattatagtccagttcttatcaacattaaaacctatagcaatcatttcaaatctattctgcaaattgtataagaataaagttagaattaacaattttattttgtacaacagtggaattttctgtcatggataatgtgcttgagtccctataatctatagacatatcatccaaacataaaccattaaaatgtttgtggtttgcttggctgtaattttcaaagtagttaattgaggacaaagggtaatgcagaagtgatagctttggtttgctgagtcttgttttaagtggccttgatatttaaaactattcctgccaccatttcttctccttggccacttcttccttgcgtctccctgcatgctgctttatttgcttctccctccccaaccacctcatggtatatttaagagtgaaagggacaaactagtaggtttgtcaagtttaatataaagcactgatgtaacttgctaggtaaacggaaagataagttctaactgcctactatccaatgtcagttaattggtgtcttcccccctcatttgctctcttccctaaaatgtgtcccagatgccttcatttgctgttttacttctatgttctgcttttcctcctctctttgttcccttcctgtctatccattgagtttatgaaatggaagagttaactgcatgcactagtgtttggagggtgttgtggtttgtctttctaattaggtgtatagcctattcactttcctagaataaatctcttaacctaaatttgagtagtctgcattttggcaactcctctagcagcttggtagcctagtacaggttgtttttttaaaaaaggaaaagcaggaaggaggagtgaattttattaacatgtttgccaaatgtattgagatttggcctctgaagaacactttttcagtgttaagtttctttaccttaagattcagaaatactttagaatattattaattttaagtcctgtctttacatccttttggaaaacttgtattaccatgggtttggaaaaaggacaacgaaaggcttttcatgtaaagataagatctttagctatctctaaccctgtccttttttcactgcattttttctagttttgcttcattgcttatcattaggatagggtaagtgaagtttgctatgctgctagcatcctaagatgatacctttgttgaaagaattgtgaatagcatgattcatttctagcagaggctgagtttaggacagcagcttccattgagaagtctttctgtgtcgtgaatagcattttaatgacctcttggctcacataagcaaacaacatagggacgtatctgctatgaaaatccacaaatttttcagatagtgccctaaaaacaattttatatgcctcactggttgttattcttaggttattcccacacttgactttatcattgtttactactagtaaaaagcagcattgccaaataatccctaattttccactaaaaatataatgaaatgatgttaagctttttgaaaagtttaggttaaacctactgttgttagattaatgtatttgttgcttccctttatctggaatgtggcattagcttttttattttaaccctctttaattcttattcaattccatgacttaaggttggagagctaaacactgggatttttggataacagactgacagttttgcataattataatcggcattgtacatagaaaggatatggctaccttttgttaaatctgcactttctaaatatcaaaaaagggaaatgaagtataaatcaatttttgtataatctgtttgaaacatgagttttatttgcttaatattagggctttgccccttttctgtaagtctcttgggatcctgtgtagaagctgttctcattaaacaccaaacagttaagtccattctctggtactagctacaaattcggtttcatattctacttaacaatttaaataaactgaaatatttctagatggtctacttctgttcatataaaaacaaaacttgatttccagctgtgtggtttggttttcatttatttatggaattggaagattacttctgaaaaaaatgtggaatcgcaaactcaaagagttgacaaaaatgggaaatcactgtcaacctatggaaaactggaaaggcaatttcaagaactgtctttgctgagaaactacattaaaaaatagaattatctctgggatcctaaagcggaatcatccttgtgccaaaataggagatgccacgatcctaatcacacctggcttacactagttggatgtgcctaaggccactacagctgaggtcacctgattcctcagggggaccaagctgggctcctcatactggagggtaaatccttgttttagcagcagctggcctcttactaagaaacaaagtattggccaggtgcggtggctcatgcctgta

SEQ ID NO: 844 - DNA, 603 bp, Homo sapiens
atggcgaagaagacgtacgacctgcttttcaagctgctcctgatcggggattccggagtggggaagacctgcgtcctttttcgtttttcggatgatgccttcaatactacctttatttccaccataggaatagacttcaagatcaaaacagttgaattacaaggaaagaagatcaagctacagatatgggatacagcaggccaggagcgatttcacaccatcacaacctcctactacagaggcgcaatgggtatcatgctagtatatgacatcaccaatggtaaaagttttgaaaacatcagcaaatggcttagaaacatagatgagcatgccaatgaagatgtggaaagaatgttactaggaaacaagtgtgatatggacgacaaaagagttgtacctaaaggaaaaggagaacagattgcaagggagcatggtattaggttttttgagactagtgcaaaagcaaatataaacatcgaaaaggcgttcctcacgttagctgaagatatccttcgaaagacccctgtaaaagagcccaacagtgaaaatgtagatatcagcagtggaggaggcgtgacaggctggaagagcaaatgctgctga

SEQ ID NO: 845 - DNA, 2158 bp, Homo sapiens
acacagggtttcctcatgttgcccaggctggtctcggacacttgaattcaagcaatctgccggccccgccgggtgtgccgcatgagggcgcgggccgcccaaggaccgcgagtggggccgcgagtgctgagcccggcgcgcccgagccgctcctcctcccggcctgctccctgggcggagccggggcagtgcggctctgggctggccgaaggggtggcgctgcgatcccgcagggcagcgacgcgactctggtgcgggccgtcttcttccccccgagctgggcgtgcgcggccgcaatgaactgggagctgctgctgtggctgctggtgctgtgcgcgctgctcctgctcttggtgcagctgctgcgcttcctgagggctgacggcgacctgacgctactatgggccgagtggcagggacgacgcccagaatgggagctgactgatatggtggtgtgggtgactggagcctcgagtggaattggtgaggagctggcttaccagttgtctaaactaggagtttctcttgtgctgtcagccagaagagtgcatgagctggaaagggtgaaaagaagatgcctagagaatggcaatttaaaagaaaaagatatacttgttttgccccttgacctgaccgacactggttcccatgaagcggctaccaaagctgttctccaggagtttggtagaatcgacattctggtcaacaatggtggaatgtcccagcgttctctgtgcatggataccagcttggatgtctacagaaagctaatagagcttaactacttagggacggtgtccttgacaaaatgtgttctgcctcacatgatcgagaggaagcaaggaaagattgttactgtgaatagcatcctgggtatcatatctgtacctctttccattggatactgtgctagcaagcatgctctccggggtttttttaatggccttcgaacagaacttgccacatacccaggtataatagtttctaacatttgcccaggacctgtgcaatcaaatattgtggagaattccctagctggagaagtcacaaagactataggcaataatggagaccagtcccacaagatgacaaccagtcgttgtgtgcggctgatgttaatcagcatggccaatgatttgaaagaagtttggatctcagaacaacctttcttgttagtaacatatttgtggcaatacatgccaacctgggcctggtggataaccaacaagatggggaagaaaaggattgagaactttaagagtggtgtggatgcagactcttcttattttaaaatctttaagacaaaacatgactgaaaagagcacctgtacttttcaagccactggagggagaaatggaaaacatgaaaacagcaatcttcttatgcttctgaataatcaaagactaatttgtgattttactttttaatagatatgactttgcttccaacatggaatgaaataaaaaataaataataaaagattgccatgaatcttgcaaaaaaggtattaactcatactatattcttggataaaataaccttttaaaatactttagcacatatgcttaaaatctaagttaacagatttgtcttagtccatttgtgctgctataacaaaataccacagatttggtaatttataaacaacagaaatctgtttttcctggctcttgaggctgggaattccaagaccaatgcaccagcagaattagtgtctggtgaaggctgatctctgcttccaagatggcacctcattgctgcatcctccacagtggaggaatgtatgtcctcacatggtggaagggacagaagggaaagaggagcaaaatgctttcaaaagagcatttaatctcattcattactcagtcacctcttaaaggccacatcctttaatactgttgctttggggattaagtttcgacatgaattttggaggggacaaaaacatccaaaccatagcaacataaatgtatagaatatttcacacaaagcagagtgctgggtaatgaccagatataaagaagtatttgaaatgaccttacctccaagatgcttatactcttagaaaagttgacaggtacagatggctgtaatttgaagcagcaggtaggattcattgcacctattattcattaaacacctgttgtatgtcttcta

SEQ ID NO: 846 - DNA, 1236 bp, Homo sapiens
ccgtcttcttccccccgagctgggcgtgcgcggccgcaatgaactgggagctgctgctgtggctgctggtgctgtgcgcgctgctcctgctcttggtgcagctgctgcgcttcctgagggctgacggcgacctgacgctactatgggccgagtggcagggacgacgcccagaatgggagctgactgatatggtggtgtgggtgactggagcctcgagtggaattggtgaggagctggcttaccagttgtctaaactaggagtttctcttgtgctgtcagccagaagagtgcatgagctggaaagggtgaaaagaagatgcctagagaatggcaatttaaaagaaaaagatatacttgttttgccccttgacctgaccgacactggttcccatgaagcggctaccaaagctgttctccaggagtttggtagaatcgacattctggtcaacaatggtggaatgtcccagcgttctctgtgcatggataccagcttggatgtctacagaaagctaatagagcttaactacttagggacggtgtccttgacaaaatgtgttctgcctcacatgatcgagaggaagcaaggaaagattgttactgtgaatagcatcctgggtatcatatctgtacctctttccattggatactgtgctagcaagcatgctctccggggtttttttaatggccttcgaacagaacttgccacatacccaggtataatagtttctaacatttgcccaggacctgtgcaatcaaatattgtggagaattccctagctggagaagtcacaaagactataggcaataatggagaccagtcccacaagatgacaaccagtcgttgtgtgcggctgatgttaatcagcatggccaatgatttgaaagaagtttggatctcagaacaacctttcttgttagtaacatatttgtggcaatacatgccaacctgggcctggtggataaccaacaagatggggaagaaaaggattgagaactttaagagtggtgtggatgcagactcttcttattttaaaatctttaagacaaaacatgactgaaaagagcacctgtacttttcaagccactggagggagaaatggaaaacatgaaaacagcaatcttcttatgcttctgaataatcaaagactaatttgtgattttactttttaatagatatgactttgcttccaacatggaatgaaataaaaaaaaaaaaaaaaaaaaaaaaaaaaaaaa

SEQ ID NO: 847 - DNA, 2318 bp, Homo sapiens
gcaatccaagactgcttagggttcggaattacaaaaccaaattccctgctaaggctaaagttgatctgaacaaaagtaagggcaaggcaaagagaatagacattagacagggacctgaaaggatccagaaatgggactttacatcccacagaggaaacagacacagggtttcctcatgttgcccaggctggtctcggacacttgaattcaagcaatctgccggccccgccgggtgtgccgcatgagggcgcgggccgcccaaggaccgcgagtggggccgcgagtgctgagcccggcgcgcccgagccgctcctcctcccggcctgctccctgggcggagccggggcagtgcggctctgggctggccgaaggggtggcgctgcgatcccgcagggcagcgacgcgactctggtgcgggccgtcttcttccccccgagctgggcgtgcgcggccgcaatgaactgggagctgctgctgtggctgctggtgctgtgcgcgctgctcctgctcttggtgcagctgctgcgcttcctgagggctgacggcgacctgacgctactatgggccgagtggcagggacgacgcccagaatgggagctgactgatatggtggtgtgggtgactggagcctcgagtggaattggtgaggagctggcttaccagttgtctaaactaggagtttctcttgtgctgtcagccagaagagtgcatgagctggaaagggtgaaaagaagatgcctagagaatggcaatttaaaagaaaaagatatacttgttttgccccttgacctgaccgacactggttcccatgaagcggctaccaaagctgttctccaggagtttggtagaatcgacattctggtcaacaatggtggaatgtcccagcgttctctgtgcatggataccagcttggatgtctacagaaagctaatagagcttaactacttagggacggtgtccttgacaaaatgtgttctgcctcacatgatcgagaggaagcaaggaaagattgttactgtgaatagcatcctgggtatcatatctgtacctctttccattggatactgtgctagcaagcatgctctccggggtttttttaatggccttcgaacagaacttgccacatacccaggtataatagtttctaacatttgcccaggacctgtgcaatcaaatattgtggagaattccctagctggagaagtcacaaagactataggcaataatggagaccagtcccacaagatgacaaccagtcgttgtgtgcggctgatgttaatcagcatggccaatgatttgaaagaagtttggatctcagaacaacctttcttgttagtaacatatttgtggcaatacatgccaacctgggcctggtggataaccaacaagatggggaagaaaaggattgagaactttaagagtggtgtggatgcagactcttcttattttaaaatctttaagacaaaacatgactgaaaagagcacctgtacttttcaagccactggagggagaaatggaaaacatgaaaacagcaatcttcttatgcttctgaataatcaaagactaatttgtgattttactttttaatagatatgactttgcttccaacatggaatgaaataaaaaataaataataaaagattgccatgaatcttgcaaaaaaggtattaactcatactatattcttggataaaataaccttttaaaatactttagcacatatgcttaaaatctaagttaacagatttgtcttagtccatttgtgctgctataacaaaataccacagatttggtaatttataaacaacagaaatctgtttttcctggctcttgaggctgggaattccaagaccaatgcaccagcagaattagtgtctggtgaaggctgatctctgcttccaagatggcacctcattgctgcatcctccacagtggaggaatgtatgtcctcacatggtggaagggacagaagggaaagaggagcaaaatgctttcaaaagagcatttaatctcattcattactcagtcacctcttaaaggccacatcctttaatactgttgctttggggattaagtttcgacatgaattttggaggggacaaaaacatccaaaccatagcaacataaatgtatagaatatttcacacaaagcagagtgctgggtaatgaccagatataaagaagtatttgaaatgaccttacctccaagatgcttatactcttagaaaagttgacaggtacagatggctgtaatttgaagcagcaggtaggattcattgcacctattattcattaaacacctgttgtatgtcttcta

SEQ ID NO: 848 - DNA, 4604 bp, Homo sapiens
ggctgcctccccctctcagccggcagcacattccgtcgccttgccgccgcccggccccacagttgtctttgccggagctgcagtcgcgctggggttagggcgggggggcgggcggggagaggagaaggccgcggcggaggcaggtgagaggaggaaggaagcggcggcgcggcgggcacagcagctcaggcggcggcccggttcctgggagtgtcggtgcggcgcgttggttggggcggatcccgcggggcccgggcgggggaaggagtcaccggcccggccatggcggacaacgagaaactggacaaccaacggctcaagaatttcaagaacaaaggccgcgacttggagactatgagaagacaacgaaatgaagttgtagttgaattaaggaagaataaaagagatgaacatctcttaaagagaaggaatgtaccacatgaagatatctgtgaagactctgatatagatggtgattatagagtgcaaaatacctctctagaagctattgttcaaaatgcttcaagtgataaccaaggaattcaattaagtgcagttcaagctgctaggaagcttttgtccagtgatcgaaatccaccaattgatgacttaataaaatctggaatattgcccattttagtccattgtcttgaaagagatgacaatccttctttacagtttgaagctgcatgggctttgacaaacattgcatctggaacttctgaacaaactcaagcagtagttcagtccaatgctgtgccacttttcctgaggcttctccattcaccccatcagaatgtctgtgagcaagcagtgtgggcattgggaaatatcataggtgatgggccccagtgtagagattatgtcataagtcttggagttgtgaaacctttactttccttcataagtccatctattcctataacattcttaagaaatgttacttgggttatggtcaacttatgtcgccacaaagacccaccaccaccaatggaaaccattcaggagattcttccagccctttgtgttttaattcatcacacagatgtaaatatactggtagacacagtctgggccctctcttaccttactgatgctggcaatgaacaaatacagatggtaatagactctggaatagttcctcatttggttcctctgctcagccaccaggaagttaaagttcagactgctgcacttagagctgtgggcaacattgttactggaactgatgagcaaacacaagtagttttgaactgtgatgctctttcacacttcccagcactcctgacacatcccaaagagaaaattaataaagaagcagtgtggttcctctccaacatcactgcaggaaatcagcagcaggtacaggcagtaattgatgccaatcttgtaccaatgataatacaccttttggataagggggattttggcactcaaaaagaagctgcttgggccataagtaacttaacaattagtggaaggaaagatcaagtggcttaccttatccaacaaaatgttatcccacctttttgcaacttgctgactgtaaaagatgcacaagttgtgcaagtagtactcgatggactaagtaatatattaaaaatggctgaagatgaggcagaaaccataggcaatcttatagaagaatgtggagggctggagaaaattgaacaacttcaaaatcatgaaaatgaagacatctacaaattggcctatgagatcattgatcagttcttctcttcagatgatattgatgaagaccctagccttgttccagaggcaattcaaggcggaacatttggtttcaattcatctgccaatgtaccaacagaagggttccagttttagaaagatgttgtggaagttaggtacaatgcagcactgagatatatatatatatatgtgtgtgtgtatatatatatatatatacatatatataaaaaggtttgatccatcaagcttggctcatgggatctgctgctgcattaaatcgggaaagaaaatgtgaagatttcatttggaatcacagaaaatgcccaaatgaggtcaagatggcgagtgggtgcgagtgagaatgagtggcaaaatgtaatgaaaactttacatgaatgcttatttaggttgttcaaagtaaaaagggctacaggtcacagatcgtcagtgcctgagaaagaacattgacttactctatatcaattgaggggaaagtgcagtaccgtcatcttcaagccttgtaagcataaaagagaataggctgcccatataagtcaaaggaaaatgagcccaggccttgctatgaagcagtgtgtgaatggacaatgttgaatgaatgtctggctcagtgatggagagccaggttcatctttgaaatctagggctcttcactcatgaagcagactcctagtcctggagtgactgtgtacgagagcgtggttgtggtgctgtatgtgaacgcatgcaagcttgattcaccttcagggggctgataacctagtaaatcatcaaaatgagatcataagtgttaatgtacactggacatgaaaacaaagactggtttagcagcagacattggtttactctgcagcctgtgttttctgtttccccctttcccacctccttccccccacccaatccttttttttttcttttttgcttttcttttctttttttttagtttttatttactttacctagtatgcctttttttagttgcttctcaagtcagaaaacttttcaggaaggtttccctgtgcatttgcaccagatgaatgtttgatgctatgaaaagctttccatatcatcaaaactaatttgtgtagatttttgcatgaaaaaaatcataaatttccctcaaaatagactgtgttgcagtacacaagttgccataatagtataaaacagtaaaatgtgcttaaaaggccatccttttcattttcagagataacataaagatctttgcatgaggtaaatctacagcatagttcatttttagattttgttgagtcctgtaaagaagaagaagaaaaaagtttcagttgtggtagaataccgtgctgtgtttaaatgttacttgttttcaaactttgttttctatgaaaatgatatggaaacttctaaaatggaatttggtgcatatgtactgctgaataaagaccgatgaagaggtttgagtagatgtacaaatcaagtaatggtttgaacacctttaataatatgcctaatctgttcaattgttttagaatctttttatcttagatgtaggcagccatgaacaatctattttgagccactttagggagaaaactttgtatttttaaaacttgcataaaagttatgcaagtggtttttataaattggaataatacctcagttttgaggttatgcacactaaattaaatgtgacataaattaatttgtacaaaaagaactctttataaggtggctcattgtaggaaatcctgtgccttcccctttgagcacaagtgttgcatgaacaacagtttgctataagaaacataccagattagccaccattagcatctatatctactttgtgtttaaaaatcaactggtaattctgaaacactgtagaatggataaaaattattttgtgatcataactctttgttgaactagagtatttttgcagcattccttgtcatcagaaacatggttaaagtttaaaactagaagcagcagaaaactagcttgtaaaatttatccaagtagagtgcaggctaggctgtcttggggaaataaacattaaaacttaaagcaatgttttacatggggtgtgtgtgtgtggtgtgtggatttttttttttttataaagttagagtataattcaatggcttacattagcttcctgtctttttacctagaaccagcataataagaaatttctttggttctgtcatttcagtatggacatattaatattttagcccactgagtttgtccagttgacaccatcagtgcttcagttttctctctatccaaagcaaggttttaactttccttcattctccagtaaaacagaccgagacaacttgaactatattttgagtattgctatatcttcaacatatagctccaaatgatggattgtatacaaagcatagtacagaaggtttcagtaattggaaggtgaacacagcaatgctttacataatttgtgttttttagtaaaaaatattggattcaaagtaagccaatgagcttgtatacaaattttatatacaaattattgtatagaacagtgatatggaaaataggtaagggtgatattaatatctctgggtataaggactaccttatcgtttaaatattttatttccatctatagcctaatatagaacattgattttctagtagaaattctgggaagggcttttctgtctctgaaattgattcagtacagttgacagttcatcacggttacctggttaaacactttttttttttttttaattctccagtgatctaggaaattgtttcatttttaacacaggcttatttctgatggggatgggggcatagaataatatgcctaataagctaaacgttcttaacgtttcatgtcttaaactgtctttttgaacatt

SEQ ID NO: 849 - DNA, 3411 bp, Homo sapiens
ggctgcctccccctctcagccggcagcacattccgtcgccttgccgccgcccggccccacagttgtctttgccggagctgcagtcgcgctggggttagggcgggggggcgggcggggagaggagaaggccgcggcggaggcaggtgagaggaggaaggaagcggcggcgcggcgggcacagcagctcaggcggcggcccggttcctgggagtgtcggtgcggcgcgttggttggggcggatcccgcggggcccgggcgggggaaggagtcaccggcccggccatggcggacaacgagaaactggacaaccaacggctcaagaatttcaagaacaaaggccgcgacttggagactatgagaagacaacgaaatgaagttgtagttgaattaaggaagaataaaagagatgaacatctcttaaagagaaggaatgtaccacatgaagatatctgtgaagactctgatatagatggtgattatagagtgcaaaatacctctctagaagctattgttcaaaatgcttcaagtgataaccaaggaattcaattaagtgcagttcaagctgctaggaagcttttgtccagtgatcgaaatccaccaattgatgacttaataaaatctggaatattgcccattttagtccattgtcttgaaagagatgacaatccttctttacagtttgaagctgcatgggctttgacaaacattgcatctggaacttctgaacaaactcaagcagtagttcagtccaatgctgtgccacttttcctgaggcttctccattcaccccatcagaatgtctgtgagcaagcagtgtgggcattgggaaatatcataggtgatgggccccagtgtagagattatgtcataagtcttggagttgtgaaacctttactttccttcataagtccatctattcctataacattcttaagaaatgttacttgggttatggtcaacttatgtcgccacaaagacccaccaccaccaatggaaaccattcaggagattcttccagccctttgtgttttaattcatcacacagatgtaaatatactggtagacacagtctgggccctctcttaccttactgatgctggcaatgaacaaatacagatggtaatagactctggaatagttcctcatttggttcctctgctcagccaccaggaagttaaagttcagactgctgcacttagagctgtgggcaacattgttactggaactgatgagcaaacacaagtagttttgaactgtgatgctctttcacacttcccagcactcctgacacatcccaaagagaaaattaataaagaagcagtgtggttcctctccaacatcactgcaggaaatcagcagcaggtacaggcagtaattgatgccaatcttgtaccaatgataatacaccttttggataagggggattttggcactcaaaaagaagctgcttgggccataagtaacttaacaattagtggaaggaaagatcaagtggcttaccttatccaacaaaatgttatcccacctttttgcaacttgctgactgtaaaagatgcacaagttgtgcaagtagtactcgatggactaagtaatatattaaaaatggctgaagatgaggcagaaaccataggcaatcttatagaagaatgtggagggctggagaaaattgaacaacttcaaaatcatgaaaatgaagacatctacaaattggcctatgagatcattgatcagttcttctcttcagatgatattgatgaagaccctagccttgttccagaggcaattcaaggcggaacatttggtttcaattcatctgccaatgtaccaacagaagggttccagttttagaaagatgttgtggaagttaggtacaatgcagcactgagatatatatatatatatgtgtgtgtgtatatatatatatatatacatatatataaaaaggtttgatccatcaagcttggctcatgggatctgctgctgcattaaatcgggaaagaaaatgtgaagatttcatttggaatcacagaaaatgcccaaatgaggtcaagatggcgagtgggtgcgagtgagaatgagtggcaaaatgtaatgaaaactttacatgaatgcttatttaggttgttcaaagtaaaaagggctacaggtcacagatcgtcagtgcctgagaaagaacattgacttactctatatcaattgaggggaaagtgcagtaccgtcatcttcaagccttgtaagcataaaagagaataggctgcccatataagtcaaaggaaaatgagcccaggccttgctatgaagcagtgtgtgaatggacaatgttgaatgaatgtctggctcagtgatggagagccaggttcatctttgaaatctagggctcttcactcatgaagcagactcctagtcctggagtgactgtgtacgagagcgtggttgtggtgctgtatgtgaacgcatgcaagcttgattcaccttcagggggctgataacctagtaaatcatcaaaatgagatcataagtgttaatgtacactggacatgaaaacaaagactggtttagcagcagacattggtttactctgcagcctgtgttttctgtttccccctttcccacctccttccccccacccaatccttttttttttcttttttgcttttcttttctttttttttagtttttatttactttacctagtatgcctttttttagttgcttctcaagtcagaaaacttttcaggaaggtttccctgtgcatttgcaccagatgaatgtttgatgctatgaaaagctttccatatcatcaaaactaatttgtgtagatttttgcatgaaaaaaatcataaatttccctcaaaatagactgtgttgcagtacacaagttgccataatagtataaaacagtaaaatgtgcttaaaaggccatccttttcattttcagagataacataaagatctttgcatgaggtaaatctacagcatagttcatttttagattttgttgagtcctgtaaagaagaagaagaaaaaagtttcagttgtggtagaataccgtgctgtgtttaaatgttacttgttttcaaactttgttttctatgaaaatgatatggaaacttctaaaatggaatttggtgcatatgtactgctgaataaagaccgatgaagaggtttgagtagatgtacaaatcaagtaatggtttgaacacctttaataatatgcctaatctgttcaattgttttagaatctttttatcttagatgtaggcagccatgaacaatctattttgagccactttagggagaaaactttgtatttttaaaacttgcataaaagttatgcaagtggttttggaaatcctgtgccttcccctttgagcacaagtgttgcatgaacaacagtttgctataagaaac

SEQ ID NO: 850 - DNA, 1717 bp, Homo sapiens
gcacgagccatggcggacaacgagaaactggacaaccaacggctcaagaatttcaagaacaaaggccgcgacttggagactatgagaagacaacgaaatgaagttgtagttgaattaaggaagaataaaagagatgaacatctcttaaagagaaggaatgtaccacatgaagatatctgtgaagactctgatatagatggtgattatagagtgcaaaatacctctctagaagctattgttcaaaatgcttcaagtgataaccaaggaattcaattaagtgcagttcaagctgctaggaagcttttgtccagtgatcgaaatccaccaattgatgacttaataaaatctggaatattgcccattttagtccattgtcttgaaagagatgacaatccttctttacagtttgaagctgcatgggctttgacaaacattgcatctggaacttctgaacaaactcaagcagtagttcagtccaatgctgtgccacttttcctgaggcttctccattcaccccatcagaatgtctgtgagcaagcagtgtgggcattgggaaatatcataggtgatgggccccagtgtagagattatgtcataagtcttggagttgtgaaacctttactttccttcataagtccatctattcctataacattcttaagaaatgttacttgggttatggtcaacttatgtcgccacaaagacccaccaccaccaatggaaaccattcaggagattcttccagccctttgtgttttaattcatcacacagatgtaaatatactggtagacacagtctgggccctctcttaccttactgatgctggcaatgaacaaatacagatggtaatagactctggaatagttcctcatttggttcctctgctcagccaccaggaagttaaagttcagactgctgcacttagagctgtgggcaacattgttactggaactgatgagcaaacacaagtagttttgaactgtgatgctctttcacacttcccagcactcctgacacatcccaaagagaaaattaataaagaagcagtgtggttcctctccaacatcactgcaggaaatcagcagcaggtacaggcagtaattgatgccaatcttgtaccaatgataatacaccttttggataagggggattttggcactcaaaaagaagctgcttgggccataagtaacttaacaattagtggaaggaaagatcaagtggcttaccttatccaacaaaatgttatcccacctttttgcaacttgctgactgtaaaagatgcacaagttgtgcaagtagtactcgatggactaagtaatatattaaaaatggctgaagatgaggcagaaaccataggcaatcttatagaagaatgtggagggctggagaaaattgaacaacttcaaaatcatgaaaatgaagacatctacaaattggcctatgagatcattgatcagttcttctcttcagatgatattgatgaagaccctagccttgttccagaggcaattcaaggcggaacatttggtttcaattcatctgccaatgtaccaacagaagggttccagttttagaaagatgttgtggaagttaggtacaatgcagcactgagatatatatatatatatgtgtgtgtgtatatatatatatatatacatatatataaaaaggtttgatccatcaaaaaaaaaaaaaaaaaaaaaaaaaaaaaaaaaa

SEQ ID NO: 851 - DNA, 2339 bp, Homo sapiens
ggtccaccatggccctgctgcactccggccgcgtcctccccgggatcgccgccgccttccacccgggcctcgccgccgcggcctctgccagagccagctcctggtggacccatgtggaaatgggacctccagatcccattctgggagtcactgaagcctttaagagggacaccaatagcaaaaagatgaatctgggagttggtgcctaccgggatgataatggaaagccttacgttctgcctagcgtccgcaaggcagaggcccagattgccgcaaaaaatttggacaaggaatacctgcccattgggggactggctgaattttgcaaggcatctgcagaactagccctgggtgagaacagcgaagtcttgaagagtggccggtttgtcactgtgcagaccatttctggaactggagccttaaggatcggagccagttttctgcaaagattttttaagttcagccgagatgtctttctgcccaaaccaacctggggaaaccacacacccatcttcagggatgctggcatgcagctacaaggttatcggtattatgaccccaagacttgcggttttgacttcacaggcgctgtggaggatatttcaaaaataccagagcagagtgttcttcttctgcatgcctgcgcccacaatcccacgggagtggacccgcgtccggaacagtggaaggaaatagcaacagtggtgaagaaaaggaatctctttgcgttctttgacatggcctaccaaggctttgccagtggtgatggtgataaggatgcctgggctgtgcgccacttcatcgaacagggcattaatgtttgcctctgccaatcatatgccaagaacatgggcttatatggtgagcgtgtaggagccttcactatggtctgcaaagatgcggatgaagccaaaagggtagagtcacagttgaagatcttgatccgtcccatgtattccaaccctcccctcaatggggcccggattgctgctgccattctgaacaccccagatttgcgaaaacaatggctgcaagaagtgaaaggcatggctgaccgcatcattggcatgcggactcaactggtctccaacctcaagaaggagggttccacccacaattggcaacacatcaccgaccaaattggcatgttctgtttcacagggctaaagcctgaacaggtggagcggctgatcaaggagttctccatctacatgacaaaagatggccgcatctctgtggcaggggtcacctccagcaacgtgggctaccttgcccatgccattcaccaggtcaccaagtaatgtccctgggtcgaggaaacagagacaacctttctgtcttcagcctctgctattgagagcttcacacagacaatgagagagggtggatggtggtgagtggatcatttctttcagccacagtgtgtaacactcagcatttgaatgtttctcagaaaagaacatgtagtgacacagggcagaggcatccatggctggcgtctggaatattaaaccaaactctccccggtccttttttctccaacttttctcaaagagtttacatgtgcaagaaagtcatcgcaccaaaaaacctgtcaattatgccattgcaatatttcagaagctttaactgaagtgtcaggttcctcgtgagaaacaagcacaccttagaggctttgagagaaggccagctagttctgtcatgagtagtcggcctcgtgtctgtcctcccatcttggaacaaccttatcaacaggccgcactgcagaaatgatgttttatgaaaaccatgagctgctgccactccagcaagggaaataatgcagtttcctgtcttatttaagaaaaagagaaggctctcttttctcccttgtcattgccgttcttttccttacacgcaaaacatttttaactattgcagtttcatcccattctactgcttgattgaccatcaactccatcctatcgagattatttaagaatgaagaacataatttttctgctgatgccgtaccctcacccttttcagcaaagaatagtggagagtaggaaactgtactttatctcggcatcctcttgaatgatagtgcaagtttctccagttgggatgttgtctctgcccggttggacctcctccctttgttgaatgtggtgtgcagcctctcatctcacactgtgagtccagcggcgcagggtggtaccaggaaagaggatattctaggcttgcgtgctgctagctgggttcaggcttcacccactggaaagaaccaccatctgctctaaccatgtagacttattgcggcctggttttctctgttacaataaaattactgtagaccc

SEQ ID NO: 852 - DNA, 2417 bp, Homo sapiens
ggcccagcacgcggccgctctggcccagggaagtccctgtccttaccttcagcaggagccggttccctgtgtgtgtgtccgctcgccctctgctccgtcctgcggctgcccactgccctcctacggtccaccatggccctgctgcactccggccgcgtcctccccgggatcgccgccgccttccacccgggcctcgccgccgcggcctctgccagagccagctcctggtggacccatgtggaaatgggacctccagatcccattctgggagtcactgaagcctttaagagggacaccaatagcaaaaagatgaatctgggagttggtgcctaccgggatgataacggaaagccttacgtgctgcctagcgtccgcaaggcagaggcccagattgccgcaaaaaatttggacaaggaatacctgcccattgggggactggctgaattttgcaaggcatctgcagaactagccctgggtgagaacagcgaagtcttgaagagtggccggtttgtcactgtgcagaccatttctggaactggagccttaaggatcggagccagttttctgcaaagattttttaagttcagccgagatgtctttctgcccaaaccaacctggggaaaccacacacccatcttcagggatgctggcatgcagctacaaggttatcggtattatgaccccaagacttgcggttttgacttcacaggcgctgtggaggatatttcaaaaataccagagcagagtgttcttcttctgcatgcctgcgcccacaatcccacgggagtggacccgcgtccggaacagtggaaggaaatagcaacagtggtgaagaaaaggaatctctttgcgttctttgacatggcctaccaaggctttgccagtggtgatggtgataaggatgcctgggctgtgcgccacttcatcgaacagggcattaatgtttgtctctgccaatcatatgccaagaacatgggcttatatggtgagcgtgtaggagccttcactatggtctgcaaagatgcggatgaagccaaaagggtagagtcacagttgaagatcttgatccgtcccatgtattccaaccctcccctcaatggggcccggattgctgctgccattctgaacaccccagatttgcgaaaacaatggctgcaagaagtgaaaggcatggctgaccgcatcattggcatgcggactcaactggtctccaacctcaagaaggagggttccacccacaattggcaacacatcaccgaccaaattggcatgttctgtttcacagggctaaagcctgaacaggtggagcggctgatcaaggagttctccatctacatgacaaaagatggccgcatctctgtggcaggggtcacctccagcaacgtgggctaccttgcccatgccattcaccaggtcaccaagtaatgtccctggtgcgaggaaacagagacaacctttctgtcttcagcctctgctattgagagcttcacacagacaatgagagagggtggatggtggtgagtggatcatttctttcagccacagtgtgtaacactcagcatttgaatgtttctcagaaaagaacatgtagtgacacagggcagaggcatccatggctggcgtctggaatattaaaccaaactctccccggtccttttttctccaacttttctcaaagagtttacatgtgcaagaaagtcatcgcaccaaaaaacctgtcaattatgccattgcaatatttcagaagctttaactgaagtgtcaggttcctcgtgagaaacagcacacgttagaggctttgagagaaggcctagttctgtcatgagtagtcggcctcgtgtctgtcctcccatcttggaacaaccttatcaacaggccgcactgcagaaatgatgttttatgaaaaccaatgaggctgctgccactccagcaagggaaataatgcagtttcctgtcttatttaagaaaaagagaaggctctcttttctcccttgtcattgccgttcttttccttacacgcaaagattttttaactattgcagattttcatcccattctactgcttgattgaccatcaactccatcctatcgagatttatttaagaatgaagaacataattttctgctgatgccgtaccctcacccttttcagcaaagaatagtggagagtaggaaactgtactttatctcggcatcctcttgaatgatagtgcaagtttctccagttgggatgttgtctctgcccggttggacctcctccctttgttgaatgtggtgtgcagcctctcatctcacactgtgagtccagcggcgcagggtggtaccaggaaagaggatattcaaccaccatctgctctaaccatgtagacttattgcggcctggtttctctgttacaataaaattactgtagacccaa

SEQ ID NO: 853 - DNA, 2465 bp, Homo sapiens
ggcccagcacgcggccgctctggcccagggaagtccctgtccttaccttcagcaggagccggttccctgtgtgtgtgtccgctcgccctctgctccgtcctgcggctgcccactgccctcctacggtccaccatggccctgctgcactccggccgcgtcctccccgggatcgccgccgccttccacccgggcctcgccgccgcggcctctgccagagccagctcctggtggacccatgtggaaatgggacctccagatcccattctgggagtcactgaagcctttaagagggacaccaatagcaaaaagatgaatctgggagttggtgcctaccgggatgataacggaaagccttacgtgctgcctagcgtccgcaaggcagaggcccagattgccgcaaaaaatttggacaaggaatacctgcccattgggggactggctgaattttgcaaggcatctgcagaactagccctgggtgagaacagcgaagtcttgaagagtggccggtttgtcactgtgcagaccatttctggaactggagccttaaggatcggagccagttttctgcaaagattttttaagttcagccgagatgtctttctgcccaaaccaacctggggaaaccacacacccatcttcagggatgctggcatgcagctacaaggttatcggtattatgaccccaagacttgcggttttgacttcacaggcgctgtggaggatatttcaaaaataccagagcagagtgttcttcttctgcatgcctgcgcccacaatcccacgggagtggacccgcgtccggaacagtggaaggaaatagcaacagtggtgaagaaaaggaatctctttgcgttctttgacatggcctaccaaggctttgccagtggtgatggtgataaggatgcctgggctgtgcgccacttcatcgaacagggcattaatgtttgtctctgccaatcatatgccaagaacatgggcttatatggtgagcgtgtaggagccttcactatggtctgcaaagatgcggatgaagccaaaagggtagagtcacagttgaagatcttgatccgtcccatgtattccaaccctcccctcaatggggcccggattgctgctgccattctgaacaccccagatttgcgaaaacaatggctgcaagaagtgaaaggcatggctgaccgcatcattggcatgcggactcaactggtctccaacctcaagaaggagggttccacccacaattggcaacacatcaccgaccaaattggcatgttctgtttcacagggctaaagcctgaacaggtggagcggctgatcaaggagttctccatctacatgacaaaagatggccgcatctctgtggcaggggtcacctccagcaacgtgggctaccttgcccatgccattcaccaggtcaccaagtaatgtccctggtgcgaggaaacagagacaacctttctgtcttcagcctctgctattgagagcttcacacagacaatgagagagggtggatggtggtgagtggatcatttctttcagccacagtgtgtaacactcagcatttgaatgtttctcagaaaagaacatgtagtgacacagggcagaggcatccatggctggcgtctggaatattaaaccaaactctccccggtccttttttctccaacttttctcaaagagtttacatgtgcaagaaagtcatcgcaccaaaaaacctgtcaattatgccattgcaatatttcagaagctttaactgaagtgtcaggttcctcgtgagaaacagcacacgttagaggctttgagagaaggcctagttctgtcatgagtagtcggcctcgtgtctgtcctcccatcttggaacaaccttatcaacaggccgcactgcagaaatgatgttttatgaaaaccaatgaggctgctgccactccagcaagggaaataatgcagtttcctgtcttatttaagaaaaagagaaggctctcttttctcccttgtcattgccgttcttttccttacacgcaaagattttttaactattgcagattttcatcccattctactgcttgattgaccatcaactccatcctatcgagatttatttaagaatgaagaacataattttctgctgatgccgtaccctcacccttttcagcaaagaatagtggagagtaggaaactgtactttatctcggcatcctcttgaatgatagtgcaagtttctccagttgggatgttgtctctgcccggttggacctcctccctttgttgaatgtggtgtgcagcctctcatctcacactgtgagtccagcggcgcagggtggtaccaggaaagaggatattctaggctttgcgtgctgctagctgggttcaggcttcacccactggaaagaaccaccatctgctctaaccatgtagacttattgcggcctggtttctctgttacaataaaattactgtagacccaa

SEQ ID NO: 854 - DNA, 4289 bp, Homo sapiens
gaaggagcagttggttcaatctctggtaatctatgccagcaattatgacaatgttagcagaccatgcagctcgtcagctgcttgatttcagccaaaaactggatatcaacttattagataatgtggtgaattgcttataccatggagaaggagcccagcaaagaatggctcaagaagtactgacacatttaaaggagcatcctgatgcttggacaagagtcgacacaattttggaattttctcagaatatgaatacgaaatactatggactacaaattttggaaaatgtgataaaaacaaggtggaagattcttccaaggaaccagtgcgaaggaataaaaaaatacgttgttggcctcattatcaagacgtcatctgacccaacttgtgtagagaaagaaaaggtgtatatcggaaaattaaatatgatccttgttcagatactgaaacaagaatggcccaaacattggccaacttttatcagtgatattgttggagcaagtaggaccagcgaaagtctctgtcaaaataatatggtgattcttaaactcttgagtgaagaagtatttgatttctctagtggacagataacccaagtcaaatctaagcatttaaaagacagcatgtgcaatgaattctcacagatatttcaactgtgtcagtttgtaatggaaaattctcaaaatgctccacttgtacatgcaaccttggaaacattgctcagatttctgaactggattcccctgggatatatttttgagaccaaattaatcagcacattgatttataagttcctgaatgttccaatgtttcgaaatgtctctctgaagtgcctcactgagattgctggtgtgagtgtaagccaatatgaagaacaatttgtaacactatttactctgacaatgatgcaactaaagcagatgcttcctttaaataccaatattcgacttgcgtactcaaatggaaaagatgatgaacagaacttcattcaaaatctcagtttgtttctctgcacctttcttaaggaacatgatcaacttatagaaaaaagattaaatctcagggaaactcttatggaggcccttcattatatgttgttggtatctgaagtagaagaaactgaaatctttaaaatttgtcttgaatactggaatcatttggctgctgaactctatagagagagtccattctctacatctgcctctccgttgctttctggaagtcaacattttgatgttcctcccaggagacagctatatttgcccatgttattcaaggtccgtttattaatggttagtcgaatggctaaaccagaggaagtattggttgtagagaatgatcaaggagaagttgtgagagaattcatgaaggatacagattccataaatttgtataagaatatgagggaaacattggtttatcttactcatctggattatgtagatacagaaagaataatgacagagaagcttcacaatcaagtgaatggtacagagtggtcatggaaaaatttgaatacattgtgttgggcaataggctccattagtggagcaatgcatgaagaggacgaaaaacgatttcttgttactgttataaaggatctattaggattatgtgaacagaaaagaggcaaagataataaagctattattgcatcaaatatcatgtacatagtaggtcaatacccacgttttttgagagctcactggaaatttctgaagactgtagttaacaagctgttcgaattcatgcatgagacccatgatggagtccaggatatggcttgtgatactttcattaaaatagcccaaaaatgccgcaggcatttcgttcaggttcaggttggagaagtgatgccatttattgatgaaattttgaacaacattaacactattatttgtgatcttcagcctcaacaggttcatacgttttatgaagctgtggggtacatgattggtgcacaaacagatcaaacagtacaagaacacttgatagaaaagtacatgttactccctaatcaagtgtgggatagtataatccagcaggcaaccaaaaatgtggatatactgaaagatcctgaaacagtcaagcagcttggtagcattttgaaaacaaatgtgagagcctgcaaagctgttggacacccctttgtaattcagcttggaagaatttatttagatatgcttaatgtatacaagtgcctcagtgaaaatatttctgcagctatccaagctaatggtgaaatggttacaaagcaaccattgattagaagtatgcgaactgtaaaaagggaaactttaaagttaatatctggttgggtgagccgatccaatgatccacagatggtcgctgaaaattttgttccccctctgttggatgcagttctcattgattatcagagaaatgtcccagctgctagagaaccagaagtgcttagtactatggccataattgtcaacaagttagggggacatataacagctgaaatacctcaaatatttgatgctgtttttgaatgcacattgaatatgataaataaggactttgaagaatatcctgaacatagaacgaactttttcttactacttcaggctgtcaattctcattgtttcccagcattccttgctattccacctacacagtttaaacttgttttggattccatcatttgggctttcaaacatactatgaggaatgtcgcagatacgggcttacagatactttttacactcttacaaaatgttgcacaagaagaagctgcagctcagagtttttatcaaacttatttttgtgatattctccagcatatcttttctgttgtgacagacacttcacatactgctggtttaacaatgcatgcatcaattcttgcatatatgtttaatttggttgaagaaggaaaaataagtacatcattaaatcctggaaatccagttaacaaccaaatctttcttcaggaatatgtggctaatctccttaagtcggccttccctcacctacaagatgctcaagtaaagctctttgtgacagggcttttcagcttaaatcaagatattcctgctttcaaggaacatttaagagatttcctagttcaaataaaggaatttgcaggtgaagacacttctgatttgtttttggaagagagagaaatagccctacggcaggctgatgaagagaaacataaacgtcaaatgtctgtccctggcatctttaatccacatgagattccagaagaaatgtgtgattaaaatccaaattcatgctgttttttttctctgcaactcgttagcagaggaaaacagcatgtgggtatttgtcgaccaaaatgatgccaatttgtaaattaaaatgtcacctagtggccctttttcttatgtgtttttttgtataagaaattttctgtgaaatatccttccattgtttaagcttttgttttggtcatctttatttagtttgcatgaagttgaaaattaaggcatttttaaaaattttacttcatgcccatttttgtggctgggctggggggaggaggcaaattcgatttgaacatatacttgtaattctaatgcaaaattatacaatttttcctgtaaacaataccaatttttaattagggagcattttccttctagtctatttcagcctagaagaaaagataatgagtaaaacaaattgcgttgtttaaaggattatagtgctgcattgtctgaagttagcacctcttggactgaatcgtttgtctagactacatgtattacaaagtctctttggcaagattgcagcaagatcatgtgcatatcatcccattgtaaagcgacttcaaaaatatgggaacacagttagttatttttacacagttctttttgtttttgtgtgtgtgtgctgtcgcttgtcgacaacagctttttgttttcctcaatgaggagtgttgctcatttgtgagccttcattaactcgaagtgaaatggttaaaaatatttatcctgttagaataggctgcatctttttaacaactcattaaaaaacaaaacaactctggcttttgagatgacttatactaatttacattgtttaccaagctgtagtgctttaagaacactacttaaaaagcaaaataaacttggtttacatttatttttcctttattgactcatttattcctatattaatgatagtgggtatttgtgtttaagcatcaagtaacattttaaatgaagttggaccccttgatttacaaacaagatttctaaggttattgttcctagtaaatgcagcagttgtgtaaaatg

SEQ ID NO: 855 - DNA, 4392 bp, Homo sapiens
ggctgcagcggccgcggcaggagcagcgggagctacagcatcagcaagagcaacagtagctacagccccggcggcggtgcctgttccagtctttgctgctgcagaaggagcagttggttcaatctctggtaatctatgccagcaattatgacaatgttagcagaccatgcagctcgtcagctgcttgatttcagccaaaaactggatatcaacttattagataatgtggtgaattgcttataccatggagaaggagcccagcaaagaatggctcaagaagtactgacacatttaaaggagcatcctgatgcttggacaagagtcgacacaattttggaattttctcagaatatgaatacgaaatactatggactacaaattttggaaaatgtgataaaaacaaggtggaagattcttccaaggaaccagtgcgaaggaataaaaaaatacgttgttggcctcattatcaagacgtcatctgacccaacttgtgtagagaaagaaaaggtgtatatcggaaaattaaatatgatccttgttcagatactgaaacaagaatggcccaaacattggccaacttttatcagtgatattgttggagcaagtaggaccagcgaaagtctctgtcaaaataatatggtgattcttaaactcttgagtgaagaagtatttgatttctctagtggacagataacccaagtcaaatctaagcatttaaaagacagcatgtgcaatgaattctcacagatatttcaactgtgtcagtttgtaatggaaaattctcaaaatgctccacttgtacatgcaaccttggaaacattgctcagatttctgaactggattcccctgggatatatttttgagaccaaattaatcagcacattgatttataagttcctgaatgttccaatgtttcgaaatgtctctctgaagtgcctcactgagattgctggtgtgagtgtaagccaatatgaagaacaatttgtaacactatttactctgacaatgatgcaactaaagcagatgcttcctttaaataccaatattcgacttgcgtactcaaatggaaaagatgatgaacagaacttcattcaaaatctcagtttgtttctctgcacctttcttaaggaacatgatcaacttatagaaaaaagattaaatctcagggaaactcttatggaggcccttcattatatgttgttggtatctgaagtagaagaaactgaaatctttaaaatttgtcttgaatactggaatcatttggctgctgaactctatagagagagtccattctctacatctgcctctccgttgctttctggaagtcaacattttgatgttcctcccaggagacagctatatttgcccatgttattcaaggtccgtttattaatggttagtcgaatggctaaaccagaggaagtattggttgtagagaatgatcaaggagaagttgtgagagaattcatgaaggatacagattccataaatttgtataagaatatgagggaaacattggtttatcttactcatctggattatgtagatacagaaagaataatgacagagaagcttcacaatcaagtgaatggtacagagtggtcatggaaaaatttgaatacattgtgttgggcaataggctccattagtggagcaatgcatgaagaggacgaaaaacgatttcttgttactgttataaaggatctattaggattatgtgaacagaaaagaggcaaagataataaagctattattgcatcaaatatcatgtacatagtaggtcaatacccacgttttttgagagctcactggaaatttctgaagactgtagttaacaagctgttcgaattcatgcatgagacccatgatggagtccaggatatggcttgtgatactttcattaaaatagcccaaaaatgccgcaggcatttcgttcaggttcaggttggagaagtgatgccatttattgatgaaattttgaacaacattaacactattatttgtgatcttcagcctcaacaggttcatacgttttatgaagctgtggggtacatgattggtgcacaaacagatcaaacagtacaagaacacttgatagaaaagtacatgttactccctaatcaagtgtgggatagtataatccagcaggcaaccaaaaatgtggatatactgaaagatcctgaaacagtcaagcagcttggtagcattttgaaaacaaatgtgagagcctgcaaagctgttggacacccctttgtaattcagcttggaagaatttatttagatatgcttaatgtatacaagtgcctcagtgaaaatatttctgcagctatccaagctaatggtgaaatggttacaaagcaaccattgattagaagtatgcgaactgtaaaaagggaaactttaaagttaatatctggttgggtgagccgatccaatgatccacagatggtcgctgaaaattttgttccccctctgttggatgcagttctcattgattatcagagaaatgtcccagctgctagagaaccagaagtgcttagtactatggccataattgtcaacaagttagggggacatataacagctgaaatacctcaaatatttgatgctgtttttgaatgcacattgaatatgataaataaggactttgaagaatatcctgaacatagaacgaactttttcttactacttcaggctgtcaattctcattgtttcccagcattccttgctattccacctacacagtttaaacttgttttggattccatcatttgggctttcaaacatactatgaggaatgtcgcagatacgggcttacagatactttttacactcttacaaaatgttgcacaagaagaagctgcagctcagagtttttatcaaacttatttttgtgatattctccagcatatcttttctgttgtgacagacacttcacatactgctggtttaacaatgcatgcatcaattcttgcatatatgtttaatttggttgaagaaggaaaaataagtacatcattaaatcctggaaatccagttaacaaccaaatctttcttcaggaatatgtggctaatctccttaagtcggccttccctcacctacaagatgctcaagtaaagctctttgtgacagggcttttcagcttaaatcaagatattcctgctttcaaggaacatttaagagatttcctagttcaaataaaggaatttgcaggtgaagacacttctgatttgtttttggaagagagagaaatagccctacggcaggctgatgaagagaaacataaacgtcaaatgtctgtccctggcatctttaatccacatgagattccagaagaaatgtgtgattaaaatccaaattcatgctgttttttttctctgcaactcgttagcagaggaaaacagcatgtgggtatttgtcgaccaaaatgatgccaatttgtaaattaaaatgtcacctagtggccctttttcttatgtgtttttttgtataagaaattttctgtgaaatatccttccattgtttaagcttttgttttggtcatctttatttagtttgcatgaagttgaaaattaaggcatttttaaaaattttacttcatgcccatttttgtggctgggctggggggaggaggcaaattcgatttgaacatatacttgtaattctaatgcaaaattatacaatttttcctgtaaacaataccaatttttaattagggagcattttccttctagtctatttcagcctagaagaaaagataatgagtaaaacaaattgcgttgtttaaaggattatagtgctgcattgtctgaagttagcacctcttggactgaatcgtttgtctagactacatgtattacaaagtctctttggcaagattgcagcaagatcatgtgcatatcatcccattgtaaagcgacttcaaaaatatgggaacacagttagttatttttacacagttctttttgtttttgtgtgtgtgtgctgtcgcttgtcgacaacagctttttgttttcctcaatgaggagtgttgctcatttgtgagccttcattaactcgaagtgaaatggttaaaaatatttatcctgttagaataggctgcatctttttaacaactcattaaaaaacaaaacaactctggcttttgagatgacttatactaatttacattgtttaccaagctgtagtgctttaagaacactacttaaaaagcaaaataaacttggtttacatttatttttcctttattgactcatttattcctatattaatgatagtgggtatttgtgtttaagcatcaagtaacattttaaatgaagttggaccccttgatttacaaacaagatttctaaggttattgttcctagtaaatgcagcagttgtgtaaaatg

SEQ ID NO: 856 - DNA, 4399 bp, Homo sapiens
ggggagaagcggctgcagcggccgcggcaggagcagcgggagctacagcatcagcaagagcaacagtagctacagccccggcggcggtgcctgttccagtctttgctgctgcagtccgtgcaaccacccagagggggaggggggaaccaccagtcgctgaggaacaagagaaggggggaaagtttaggcgagccttgggggggggggggccagcgccggagccgcgtgagagagggagccgtgttttggtaggggggagtcggactgcaactggcagcagagcgtctccccggccgtgtggactctacaccccctactcctgccgcttctgctgctgcctgtggctggagggtccccctggggctgaatctttgggacttgaccccgttccctcccccttccctcactccccagccgggcgggagcatttattccccagattaattccccttttgggggggggcgggtgtgtgtgtgtgtgtgtgtgtgtgtgtgtgttgggggaagcgtccctgaaatagtaaatattattgagctctttttgcccttttcctgtccgtttttttaatttccttttttgaggtgggaaaactgaaacccaccttgattcgtcccctctcccccctccccaccttccctcgccctaatcccccaacgaggaaggaaggagcagttggttcaatctctggtaatctatgccagcaattatgacaatgttagcagaccatgcagctcgtcagctgcttgatttcagccaaaaactggatatcaacttattagataatgtggtgaattgcttataccatggagaaggagcccagcaaagaatggctcaagaagtactgacacatttaaaggagcatcctgatgcttggacaagagtcgacacaattttggaattttctcagaatatgaatacgaaatactatggactacaaattttggaaaatgtgataaaaacaaggtggaagattcttccaaggaaccagtgcgaaggaataaaaaaatacgttgttggcctcattatcaagacgtcatctgacccaacttgtgtagagaaagaaaaggtgtatatcggaaaattaaatatgatccttgttcagatactgaaacaagaatggcccaaacattggccaacttttatcagtgatattgttggagcaagtaggaccagcgaaagtctctgtcaaaataatatggtgattcttaaactcttgagtgaagaagtatttgatttctctagtggacagataacccaagtcaaatctaagcatttaaaagacagcatgtgcaatgaattctcacagatatttcaactgtgtcagtttgtaatggaaaattctcaaaatgctccacttgtacatgcaaccttggaaacattgctcagatttctgaactggattcccctgggatatatttttgagaccaaattaatcagcacattgatttataagttcctgaatgttccaatgtttcgaaatgtctctctgaagtgcctcactgagattgctggtgtgagtgtaagccaatatgaagaacaatttgtaacactatttactctgacaatgatgcaactaaagcagatgcttcctttaaataccaatattcgacttgcgtactcaaatggaaaagatgatgaacagaacttcattcaaaatctcagtttgtttctctgcacctttcttaaggaacatgatcaacttatagaaaaaagattaaatctcagggaaactcttatggaggcccttcattatatgttgttggtatctgaagtagaagaaactgaaatctttaaaatttgtcttgaatactggaatcatttggctgctgaactctatagagagagtccattctctacatctgcctctccgttgctttctggaagtcaacattttgatgttcctcccaggagacagctatatttgcccatgttattcaaggtccgtttattaatggttagtcgaatggctaaaccagaggaagtattggttgtagagaatgatcaaggagaagttgtgagagaattcatgaaggatacagattccataaatttgtataagaatatgagggaaacattggtttatcttactcatctggattatgtagatacagaaagaataatgacagagaagcttcacaatcaagtgaatggtacagagtggtcatggaaaaatttgaatacattgtgttgggcaataggctccattagtggagcaatgcatgaagaggacgaaaaacgatttcttgttactgttataaaggatctattaggattatgtgaacagaaaagaggcaaagataataaagctattattgcatcaaatatcatgtacatagtaggtcaatacccacgttttttgagagctcactggaaatttctgaagactgtagttaacaagctgttcgaattcatgcatgagacccatgatggagtccaggatatggcttgtgatactttcattaaaatagcccaaaaatgccgcaggcatttcgttcaggttcaggttggagaagtgatgccatttattgatgaaattttgaacaacattaacactattatttgtgatcttcagcctcaacaggttcatacgttttatgaagctgtggggtacatgattggtgcacaaacagatcaaacagtacaagaacacttgatagaaaagtacatgttactccctaatcaagtgtgggatagtataatccagcaggcaaccaaaaatgtggatatactgaaagatcctgaaacagtcaagcagcttggtagcattttgaaaacaaatgtgagagcctgcaaagctgttggacacccctttgtaattcagcttggaagaatttatttagatatgcttaatgtatacaagtgcctcagtgaaaatatttctgcagctatccaagctaatggtgaaatggttacaaagcaaccattgattagaagtatgcgaactgtaaaaagggaaactttaaagttaatatctggttgggtgagccgatccaatgatccacagatggtcgctgaaaattttgttccccctctgttggatgcagttctcattgattatcagagaaatgtcccagctgctagagaaccagaagtgcttagtactatggccataattgtcaacaagttagggggacatataacagctgaaatacctcaaatatttgatgctgtttttgaatgcacattgaatatgataaataaggactttgaagaatatcctgaacatagaacgaactttttcttactacttcaggctgtcaattctcattgtttcccagcattccttgctattccacctacacagtttaaacttgttttggattccatcatttgggctttcaaacatactatgaggaatgtcgcagatacgggcttacagatactttttacactcttacaaaatgttgcacaagaagaagctgcagctcagagtttttatcaaacttatttttgtgatattctccagcatatcttttctgttgtgacagacacttcacatactgctggtttaacaatgcatgcatcaattcttgcatatatgtttaatttggttgaagaaggaaaaataagtacatcattaaatcctggaaatccagttaacaaccaaatctttcttcaggaatatgtggctaatctccttaagtcggccttccctcacctacaagatgctcaagtaaagctctttgtgacagggcttttcagcttaaatcaagatattcctgctttcaaggaacatttaagagatttcctagttcaaataaaggaatttgcaggtgaagacacttctgatttgtttttggaagagagagaaatagccctacggcaggctgatgaagagaaacataaacgtcaaatgtctgtccctggcatctttaatccacatgagattccagaagaaatgtgtgattaaaatccaaattcatgctgttttttttctctgcaactcgttagcagaggaaaacagcatgtgggtatttgtcgaccaaaatgatgccaatttgtaaattaaaatgtcacctagtggccctttttcttatgtgtttttttgtataagaaattttctgtgaaatatccttccattgtttaagcttttgttttggtcatctttatttagtttgcatgaagttgaaaattaaggcatttttaaaaattttacttcatgcccatttttgtggctgggctggggggaggaggcaaattcgatttgaacatatacttgtaattctaatgcaaaattatacaatttttcctgtaaacaataccaatttttaattagggagcattttccttctagtctatttcagcctagaagaaaagataatgacacctcttggactgaatcgtttgtctagactacatgtattacaaagtctctttggcaagattgcagcaagatca

SEQ ID NO: 857 - DNA, 3134 bp, Homo sapiens
ccggcgccctggttggcgccctgcccccaaagtccgtcctccccgttaggtggcgcccaaggggaggggacagccgggcaggcaggaagctgcggcttaaaagggcaacccgcgccggacccttccttcctagtcgcggggagtctgagaaagcgcacctgttccgcgaccgtcacgcacccctcctccgcctgccgcgatgtaccgctacctggccaaagcgctgctgccgtcccgggccgggcccgctgccctgggctccgcggccaaccactcggccgcgttgctgggccggggccgcggacagcccgccgccgcctcgcagccggggctcgcattggccgcccggcgccactacagcgagttggtggccgaccgcgaggacgaccccaacttcttcaagatggtggagggcttcttcgatcgcggcgccagcatcgtggaggacaagttggtgaaggacctgaggacccaggaaagcgaggagcagaagcggaaccgggtgcgcggcatcctgcggatcatcaagccctgcaaccatgtgctgagtctctccttccccatccggcgcgacgacggctcctgggaggtcatcgaaggctaccgggcccagcacagccagcaccgcacgccctgcaagggaggtatccgttacagcactgatgtgagtgtagatgaagtaaaagctttggcttctctgatgacatacaagtgtgcagtggttgatgtgccgtttgggggtgctaaagctggtgttaagatcaatcccaagaactataccgaaaatgaattggaaaagatcacaaggaggttcaccatggagctagcaaagaagggctttattggtcctggcgttgatgtgcctgctccagacatgaacacaggtgagcgggagatgtcctggattgctgatacctatgccagcaccatagggcactatgatattaatgcacacgcctgtgttactggtaaacccatcagccaagggggaatccatggacgcatctctgctactggccgtggtgtcttccatgggattgaaaacttcatcaatgaagcttcttacatgagcattttaggaatgacaccagggtttagagataaaacatttgttgttcagggatttggtaatgtgggcctacactctatgagatatttacatcgttttggtgctaaatgtattgctgttggtgagtctgatgggagtatatggaatccagatggtattgacccaaaggaactggaagacttcaaattgcaacatgggtccattctgggcttccccaaggcaaagccctatgaaggaagcatcttggaggtcgactgtgacatactgatcccagctgccactgagaagcagttgaccaaatccaacgcacccagagtcaaagccaagatcattgctgaaggtgccaatgggccaacaactccagaagctgataagatcttcctggagagaaacattttggttattccagatctctacttgaatgctggaggagtgacagtatcttactttgagtggctgaagaatctaaatcatgtcagctatggccgtttgaccttcaaatatgaaagggattctaactaccacttgctcctgtctgttcaagagagtttagaaagaaaatttggaaagcatggtggaactattcccattgtacccacggcagagttccaagacagtatatcgggtgcatctgagaaagacattgtgcactctgccttggcatacacaatggagcgttctgccaggcaaattatgcacacagccatgaagtataacctgggattggacctgagaacagctgcctatgtcaatgccattgaaaaagtcttcaaagtgtacagtgaagctggtgtgaccttcacatagatggatcatggctgacttcctcactaacctcttcacgtgtaacttctgcagacctaccacaagtttacatgtaaccacagaaatccctttctctcctgactcattactaatggataccattctcaacaagtcaatccaaatcagcccgttaaggagaaagaaattaatatacaagctgagtgtgaaagtagaaatcacctacaccagagagctattttggtattttgcctttaaataaaaagcctcctccatatggctgtgcagccttgctctgtggcttttcccagcacaatcagtgctagtgctggggaagggacagtcaagagcagtcagttgcttacttattttgctctggatgagtctgggacacgctgtaactttaacacatttaagaagaaggtgtgtggccttttcagaaggtggcatggtcctcaagtgagttcttagtattttatatcagcaaaataactcaattttgcagattgcaaacaaatataaaagctgtttctgtttatgaattttattcttttagaatagaataagtacatgctgctgtaataaaattgcctttaatcacttaacaagcctaaccttgactcagtgaatgcctataaaaataataaatgaaaaaaaacagtatttttatatcataaaagtttcatttgtagcttatcattcacgtattgttgtccagcaaacattaaaagccctgtggataattacgttatcttcatacctgcaaaacggtggaggctattttcgttaaaactgtcagaattcgctgttataattatgacacatagtccaaagaatgcagtaacctttttatcatgttaactaattgttctcttttgaagatctatggttgactaattaaacaataattcaagtagagtgtcccagaaaaaaaccacttgggctccctgattggagtctggctggctctgagcattgccaatggcccctactcacctgactttgtatcctcttcttttagaggctttgcattctgcacccagcttcactaacagtgggctgaaaccaaccttgggttgagtgtttcatttgggagttatttggccagggccttttgaacaatagtgtccccatgaagtgctagataatatatgtgtaagaatcagcttttttttttttaactataatatccttcagaaatttctaactactttgtaactgcatggcttaacctggtgataaaagcagttattaaaagtctacatttttttttaaaaaaaga

SEQ ID NO: 858 - DNA, 2760 bp, Homo sapiens
agaaagcgcgcctgtttcgcgaccatcacgcacctcccctccgcttgtggccatgtaccgctacctggtggaggacctgaggacccgggagagcgaggagcagaagcggaaccgggtgcgcggcatcctgcggatcatcaagccctgcaaccatgtgctgagtctctccttccccatccggcgcgacgacggctcctgggaggtcatcgaaggctaccgggcccagcacagccagcaccgcacgccctgcaagggaggtatccgttacagcactgatgtgagtgtagatgaagtaaaagctttggcttctctgatgacatacaagtgtgcagtggttgatgtgccgtttgggggtgctaaagctggtgttaagatcaatcccaagaactatactgataatgaattggaaaagatcacaaggaggttcaccatggagctagcaaaaaagggctttattggtcctggcattgatgtgcctgctccagacatgagcacaggtgagcgggagatgtcctggatcgctgatacctatgccagcaccatagggcactatgatattaatgcacacgcctgtgttactggtaaacccatcagccaagggggaatccatggacgcatctctgctactggccgtggtgtcttccatgggattgaaaatttcatcaatgaagcttcttacatgagcattttaggaatgacaccagggtttggagataaaacatttgttgttcagggatttggtaatgtgggcctacactctatgagatatttacatcgttttggtgctaaatgtattgctgttggtgagtctgatgggagtatatggaatccagatggtattgacccaaaggaactggaagacttcaaattgcaacatgggtccattctgggcttccccaaggcaaagccctatgaaggaagcatcttggaggccgactgtgacatactgatcccagctgccagtgagaagcagttgaccaaatccaacgcacccagagtcaaagccaagatcattgctgaaggtgccaatgggccaacaactccagaagctgacaagatcttcctggagagaaacattatggttattccagatctctacttgaatgctggaggagtgacagtatcttactttgagtggctgaagaatctaaatcatgtcagctatggccgtttgaccttcaaatatgaaagggattctaactaccacttgctcatgtctgttcaagagagtttagaaagaaaatttggaaagcatggtggaactattcccattgtacccacggcagagttccaagacaggatatcgggtgcatctgagaaagacatcgtgcactctggcttggcatacacaatggagcgttctgccaggcaaattatgcgcacagccatgaagtataacctgggattggacctgagaacagctgcctatgttaatgccattgagaaagtcttcaaagtgtacaatgaagctggtgtgaccttcacatagatggatcatggctgacttcctcactatcctcttcacatgtaacttctgcagacctatcacaagtttacatgtaaccacagaaatccctttctctcctgactcattaataatggataccattctcaacaagtcaatccaagtcagcccgttaaggagaaagaaattaaggttagcggatcatgtacaagctgagtgtgaaagtagaaatcacctacaccagagagccattttggtattttgcctttaaataaaaagcctcctttatctggctgtgcagccttgctctgtggcttttcccaacacaatcagtgctagtgctggggaggaacagtcaagagcagtcagttgcttgcttattttttctggatgagtctgggacacactgtaactttaacacatttaagaagtaggtgtgtggccttttcagaaggtggcatggtcctcaagtgagttcttagtattttatatcagcaaaataattcaattttgcaggttgcaaacaaatataaaacctgtttctgtttatgaatattattcttttagaatagaataagtacatgctgctgtaataaaattgcctttaatcacttaacaagcctaaccttgactcaaacagtgaatgcctatagaaataataaatgaaaaaaactagtatttttatatcataaaacaatgtcatttatagcttatcattcatgtattgtccagcagacattaaaagccctgtggataattaagttatcttcatacctgcaaaatggtggaggctattttcattaaaactgtcagaatttgcttactataattatgatacagtccaaagaatgcagtcactttttatcatgttaactaattgttctcttttgaagatctatggttgactaattaaacaataattcaagtagagtgtcccagaaaaaaaccacttgggctccctgtttggagtctggctggctctgagcattgccaatggcccctactcacctgactttgtatcctctccttttagaggctttgcattctgcacccagcttcactaacagtgggctgaaaacatccttgggttgagtgtttcatttgggagttatttggccagggccttttgaacagtagtgtccccatgaagtgctagataatatatgtgtaagagtcagctttttttttttttttaactctaacacccttcagaaatttctaactactttgtaactgcatggcttaacctggtgataaaagcagttattaaaagtctacgttttccaaaacttacg

SEQ ID NO: 859 - DNA, 2758 bp, Homo sapiens
aggcggaggcccggcgccctgggcggcgccctgtccccgaagtccgtcctccccgttaggtggcgagcgcccgaggggaggggacagccgggcaagagcagaagcggaaccgggtgcgcggcatcctgcggatcatcaagccctgcaaccatgtgctgagtctctccttccccatccggcgcgacgacggctcctgggaggtcatcgaaggctaccgggcccagcacagccagcaccgcacgccctgcaagggaggtatccgttacagcactgatgtgagtgtagatgaagtaaaagctttggcttctctgatgacatacaagtgtgcagtggttgatgtgccgtttgggggtgctaaagctggtgttaagatcaatcccaagaactatactgataatgaattggaaaagatcacaaggaggttcaccatggagctagcaaaaaagggctttattggtcctggcattgatgtgcctgctccagacatgagcacaggtgagcgggagatgtcctggatcgctgatacctatgccagcaccatagggcactatgatattaatgcacacgcctgtgttactggtaaacccatcagccaagggggaatccatggacgcatctctgctactggccgtggtgtcttccatgggattgaaaatttcatcaatgaagcttcttacatgagcattttaggaatgacaccagggtttggagataaaacatttgttgttcagggatttggtaatgtgggcctacactctatgagatatttacatcgttttggtgctaaatgtattgctgttggtgagtctgatgggagtatatggaatccagatggtattgacccaaaggaactggaagacttcaaattgcaacatgggtccattctgggcttccccaaggcaaagccctatgaaggaagcatcttggaggccgactgtgacatactgatcccagctgccagtgagaagcagttgaccaaatccaacgcacccagagtcaaagccaagatcattgctgaaggtgccaatgggccaacaactccagaagctgacaagatcttcctggagagaaacattatggttattccagatctctacttgaatgctggaggagtgacagtatcttactttgagtggctgaagaatctaaatcatgtcagctatggccgtttgaccttcaaatatgaaagggattctaactaccacttgctcatgtctgttcaagagagtttagaaagaaaatttggaaagcatggtggaactattcccattgtacccacggcagagttccaagacaggatatcgggtgcatctgagaaagacatcgtgcactctggcttggcatacacaatggagcgttctgccaggcaaattatgcgcacagccatgaagtataacctgggattggacctgagaacagctgcctatgttaatgccattgagaaagtcttcaaagtgtacaatgaagctggtgtgaccttcacatagatggatcatggctgacttcctcactatcctcttcacatgtaacttctgcagacctatcacaagtttacatgtaaccacagaaatccctttctctcctgactcattaataatggataccattctcaacaagtcaatccaagtcagcccgttaaggagaaagaaattaaggttagcggatcatgtacaagctgagtgtgaaagtagaaatcacctacaccagagagccattttggtattttgcctttaaataaaaagcctcctttatctggctgtgcagccttgctctgtggcttttcccaacacaatcagtgctagtgctggggaggaacagtcaagagcagtcagttgcttgcttattttttctggatgagtctgggacacactgtaactttaacacatttaagaagtaggtgtgtggccttttcagaaggtggcatggtcctcaagtgagttcttagtattttatatcagcaaaataattcaattttgcaggttgcaaacaaatataaaacctgtttctgtttatgaatattattcttttagaatagaataagtacatgctgctgtaataaaattgcctttaatcacttaacaagcctaaccttgactcaaacagtgaatgcctatagaaataataaatgaaaaaaactagtatttttatatcataaaacaatgtcatttatagcttatcattcatgtattgtccagcagacattaaaagccctgtggataattaagttatcttcatacctgcaaaatggtggaggctattttcattaaaactgtcagaatttgcttactataattatgatacagtccaaagaatgcagtcactttttatcatgttaactaattgttctcttttgaagatctatggttgactaattaaacaataattcaagtagagtgtcccagaaaaaaaccacttgggctccctgtttggagtctggctggctctgagcattgccaatggcccctactcacctgactttgtatcctctccttttagaggctttgcattctgcacccagcttcactaacagtgggctgaaaacatccttgggttgagtgtttcatttgggagttatttggccagggccttttgaacagtagtgtccccatgaagtgctagataatatatgtgtaagagtcagctttttttttttttttaactctaacacccttcagaaatttctaactactttgtaactgcatggcttaacctggtgataaaagcagttattaaaagtctacgttttccaaaacttacg

SEQ ID NO: 860 - DNA, 3214 bp, Homo sapiens
gacgccccgccggcgcgcgctgccgccagcgaggcccggggaggccgcggcggaggcggaggcccggcgccctgggcggcgccctgtccccgaagtccgtcctccccgttaggtggcgagcgcccgaggggaggggacagccgggcaagcaggaagctgcggcttaaaagggcaacccgcgcgggacccttcctccctagtcgcggggagtctgagaaagcgcgcctgtttcgcgaccatcacgcacctcccctccgcttgtggccatgtaccgctacctgggcgaagcgctgttgctgtcccgggccgggcccgctgccctgggctcggcgtccgccgactcggccgcgttgctgggctgggcccggggacagcccgccgccgccccgcagccggggctggcattggccgcccggcgccactacagcgaggcggtggccgaccgcgaggacgaccccaacttcttcaagatggtggagggcttcttcgatcgcggcgccagcatcgtggaggacaagctggtggaggacctgaggacccgggagagcgaggagcagaagcggaaccgggtgcgcggcatcctgcggatcatcaagccctgcaaccatgtgctgagtctctccttccccatccggcgcgacgacggctcctgggaggtcatcgaaggctaccgggcccagcacagccagcaccgcacgccctgcaagggaggtatccgttacagcactgatgtgagtgtagatgaagtaaaagctttggcttctctgatgacatacaagtgtgcagtggttgatgtgccgtttgggggtgctaaagctggtgttaagatcaatcccaagaactatactgataatgaattggaaaagatcacaaggaggttcaccatggagctagcaaaaaagggctttattggtcctggcattgatgtgcctgctccagacatgagcacaggtgagcgggagatgtcctggatcgctgatacctatgccagcaccatagggcactatgatattaatgcacacgcctgtgttactggtaaacccatcagccaagggggaatccatggacgcatctctgctactggccgtggtgtcttccatgggattgaaaatttcatcaatgaagcttcttacatgagcattttaggaatgacaccagggtttggagataaaacatttgttgttcagggatttggtaatgtgggcctacactctatgagatatttacatcgttttggtgctaaatgtattgctgttggtgagtctgatgggagtatatggaatccagatggtattgacccaaaggaactggaagacttcaaattgcaacatgggtccattctgggcttccccaaggcaaagccctatgaaggaagcatcttggaggccgactgtgacatactgatcccagctgccagtgagaagcagttgaccaaatccaacgcacccagagtcaaagccaagatcattgctgaaggtgccaatgggccaacaactccagaagctgacaagatcttcctggagagaaacattatggttattccagatctctacttgaatgctggaggagtgacagtatcttactttgagtggctgaagaatctaaatcatgtcagctatggccgtttgaccttcaaatatgaaagggattctaactaccacttgctcatgtctgttcaagagagtttagaaagaaaatttggaaagcatggtggaactattcccattgtacccacggcagagttccaagacaggatatcgggtgcatctgagaaagacatcgtgcactctggcttggcatacacaatggagcgttctgccaggcaaattatgcgcacagccatgaagtataacctgggattggacctgagaacagctgcctatgttaatgccattgagaaagtcttcaaagtgtacaatgaagctggtgtgaccttcacatagatggatcatggctgacttcctcactatcctcttcacatgtaacttctgcagacctatcacaagtttacatgtaaccacagaaatccctttctctcctgactcattaataatggataccattctcaacaagtcaatccaagtcagcccgttaaggagaaagaaattaaggttagcggatcatgtacaagctgagtgtgaaagtagaaatcacctacaccagagagccattttggtattttgcctttaaataaaaagcctcctttatctggctgtgcagccttgctctgtggcttttcccaacacaatcagtgctagtgctggggaggaacagtcaagagcagtcagttgcttgcttattttttctggatgagtctgggacacactgtaactttaacacatttaagaagtaggtgtgtggccttttcagaaggtggcatggtcctcaagtgagttcttagtattttatatcagcaaaataattcaattttgcaggttgcaaacaaatataaaacctgtttctgtttatgaatattattcttttagaatagaataagtacatgctgctgtaataaaattgcctttaatcacttaacaagcctaaccttgactcaaacagtgaatgcctatagaaataataaatgaaaaaaactagtatttttatatcataaaacaatgtcatttatagcttatcattcatgtattgtccagcagacattaaaagccctgtggataattaagttatcttcatacctgcaaaatggtggaggctattttcattaaaactgtcagaatttgcttactataattatgatacagtccaaagaatgcagtcactttttatcatgttaactaattgttctcttttgaagatctatggttgactaattaaacaataattcaagtagagtgtcccagaaaaaaaccacttgggctccctgtttggagtctggctggctctgagcattgccaatggcccctactcacctgactttgtatcctctccttttagaggctttgcattctgcacccagcttcactaacagtgggctgaaaacatccttgggttgagtgtttcatttgggagttatttggccagggccttttgaacagtagtgtccccatgaagtgctagataatatatgtgtaagagtcagctttttttttttttttaactctaacacccttcagaaatttctaactactttgtaactgcatggcttaacctggtgataaaagcagttattaaaagtctacgttttccaaaacttacg

SEQ ID NO: 861 - DNA, 2341 bp, Homo sapiens
gaaagcgcgcctgtttcgcgaccatcacgcacctcccctccgcttgtggccatgtaccgctacctgggcgaagcgctgttgctgtcccgggccgggcccgctgccctgggctcggcgtccgccgactcggccgcgttgctgggctgggcccggggacagcccgccgccgccccgcagccggggctggcattggccgcccggcgccactacagcgaggcggtggccgaccgcgaggacgaccccaacttcttcaagatggtggagggcttcttcgatcgcggcgccagcatcgtggaggacaagctggtggaggacctgaggacccgggagagcgaggagcagaagcggaaccgggtgcgcggcatcctgcggatcatcaagccctgcaaccatgtgctgagtctctccttccccatccggcgcgacgacggctcctgggaggtcatcgaaggctaccgggcccagcacagccagcaccgcacgccctgcaagggaggtatccgttacagcactgatgtgagtgtagatgaagtaaaagctttggcttctctgatgacatacaagtgtgcagtggttgatgtgccgtttgggggtgctaaagctggtgttaagatcaatcccaagaactatactgataatgaattggaaaagatcacaaggaggttcaccatggagctagcaaaaaagggctttattggtcctggcattgatgtgcctgctccagacatgagcacaggtgagcgggagatgtcctggatcgctgatacctatgccagcaccatagggcactatgatattaatgcacacgcctgtgttactggtaaacccatcagccaagggggaatccatggacgcatctctgctactggccgtggtgtcttccatgggattgaaaatttcatcaatgaagcttcttacatgagcattttaggaatgacaccagggtttggagataaaacatttgttgttcagggatttggtaatgtgggcctacactctatgagatatttacatcgttttggtgctaaatgtattgctgttggtgagtctgatgggagtatatggaatccagatggtattgacccaaaggaactggaagacttcaaattgcaacatgggtccattctgggcttccccaaggcaaagccctatgaaggaagcatcttggaggccgactgtgacatactgatcccagctgccagtgagaagcagttgaccaaatccaacgcacccagagtcaaagccaagatcattgctgaaggtgccaatgggccaacaactccagaagctgacaagatcttcctggagagaaacattatggttattccagatctctacttgaatgctggaggagtgacagtatcttactttgagtggctgaagaatctaaatcatgtcagctatggccgtttgaccttcaaatatgaaagggattctaactaccacttgctcatgtctgttcaagagagtttagaaagaaaatttggaaagcatggtggaactattcccattgtacccacggcagagttccaagacaggatatcgggtgcatctgagaaagacatcgtgcactctggcttggcatacacaatggagcgttctgccaggcaaattatgcgcacagccatgaagtataacctgggattggacctgagaacagctgcctatgttaatgccattgagaaagtcttcaaagtgtacaatgaagctggtgtgaccttcacatagatggatcatggctgacttcctcactatcctcttcacatgtaacttctgcagacctatcacaagtttacatgtaaccacagaaatccctttctctcctgactcattaataatggataccattctcaacaagtcaatccaagtcagcccgttaaggagaaagaaattaaggttagcggatcatgtacaagctgagtgtgaaagtagaaatcacctacaccagagagccattttggtattttgcctttaaataaaaagcctcctttatctggctgtgcagccttgctctgtggcttttcccaacacaatcagtgctagtgctggggaggaacagtcaagagcagtcagttgcttgcttattttttctggatgagtctgggacacactgtaactttaacacatttaagaagtaggtgtgtggccttttcagaaggtggcatggtcctcaagtgagttcttagtattttatatcagcaaaataattcaattttgcaggttgcaaacaaatataaaacctgtttctgtttatgaatattattcttttagaatagaataagtacatgctgctgtaataaaattgcctttaatcacttaaaaaaaaaaaaaaaaaaaaaaa

SEQ ID NO: 862 - DNA, 2738 bp, Homo sapiens
acccggaggtccggcgccctggttggcgccctgcccccaaagtccgtcctccccgttaggtggcgcccaaggggaggggacagccgggcagcagaagcggaaccgggtgcgcggcatcctgcggatcatcaagccctgcaaccatgtgctgagtctctccttccccatccggcgcgacgacggctcctgggaggtcatcgaaggctaccgggcccagcacagccagcaccgcacgccctgcaagggaggtatccgttacagcactgatgtgagtgtagatgaagtaaaagctttggcttctctgatgacatacaagtgtgcagtggttgatgtgccgtttgggggtgctaaagctggtgttaagatcaatcccaagaactataccgaaaatgaattggaaaagatcacaaggaggttcaccatggagctagcaaagaagggctttattggtcctggcgttgatgtgcctgctccagacatgaacacaggtgagcgggagatgtcctggattgctgatacctatgccagcaccatagggcactatgatattaatgcacacgcctgtgttactggtaaacccatcagccaagggggaatccatggacgcatctctgctactggccgtggtgtcttccatgggattgaaaacttcatcaatgaagcttcttacatgagcattttaggaatgacaccagggtttagagataaaacatttgttgttcagggatttggtaatgtgggcctacactctatgagatatttacatcgttttggtgctaaatgtattgctgttggtgagtctgatgggagtatatggaatccagatggtattgacccaaaggaactggaagacttcaaattgcaacatgggtccattctgggcttccccaaggcaaagccctatgaaggaagcatcttggaggtcgactgtgacatactgatcccagctgccactgagaagcagttgaccaaatccaacgcacccagagtcaaagccaagatcattgctgaaggtgccaatgggccaacaactccagaagctgataagatcttcctggagagaaacattttggttattccagatctctacttgaatgctggaggagtgacagtatcttactttgagtggctgaagaatctaaatcatgtcagctatggccgtttgaccttcaaatatgaaagggattctaactaccacttgctcctgtctgttcaagagagtttagaaagaaaatttggaaagcatggtggaactattcccattgtacccacggcagagttccaagacagtatatcgggtgcatctgagaaagacattgtgcactctgccttggcatacacaatggagcgttctgccaggcaaattatgcacacagccatgaagtataacctgggattggacctgagaacagctgcctatgtcaatgccattgaaaaagtcttcaaagtgtacagtgaagctggtgtgaccttcacatagatggatcatggctgacttcctcactaacctcttcacgtgtaacttctgcagacctaccacaagtttacatgtaaccacagaaatccctttctctcctgactcattactaatggataccattctcaacaagtcaatccaaatcagcccgttaaggagaaagaaattaatatacaagctgagtgtgaaagtagaaatcacctacaccagagagctattttggtattttgcctttaaataaaaagcctcctccatatggctgtgcagccttgctctgtggcttttcccagcacaatcagtgctagtgctggggaagggacagtcaagagcagtcagttgcttacttattttgctctggatgagtctgggacacgctgtaactttaacacatttaagaagaaggtgtgtggccttttcagaaggtggcatggtcctcaagtgagttcttagtattttatatcagcaaaataactcaattttgcagattgcaaacaaatataaaagctgtttctgtttatgaattttattcttttagaatagaataagtacatgctgctgtaataaaattgcctttaatcacttaacaagcctaaccttgactcagtgaatgcctataaaaataataaatgaaaaaaaacagtatttttatatcataaaagtttcatttgtagcttatcattcacgtattgttgtccagcaaacattaaaagccctgtggataattacgttatcttcatacctgcaaaacggtggaggctattttcgttaaaactgtcagaattcgctgttataattatgacacatagtccaaagaatgcagtaacctttttatcatgttaactaattgttctcttttgaagatctatggttgactaattaaacaataattcaagtagagtgtcccagaaaaaaaccacttgggctccctgattggagtctggctggctctgagcattgccaatggcccctactcacctgactttgtatcctcttcttttagaggctttgcattctgcacccagcttcactaacagtgggctgaaaccaaccttgggttgagtgtttcatttgggagttatttggccagggccttttgaacaatagtgtccccatgaagtgctagataatatatgtgtaagaatcagcttttttttttttaactataatatccttcagaaatttctaactactttgtaactgcatggcttaacctggtgataaaagcagttattaaaagtctacatttttttttaaaaaaaga

SEQ ID NO: 863 - DNA, 3025 bp, Homo sapiens
gacgccccgccggcgcgcgctgccgccagcgaggcccggggaggccgcggcggaggcggaggcccggcgccctgggcggcgccctgtccccgaagtccgtcctccccgttaggtggcgagcgcccgaggggaggggacagccgggcaagcaggaagctgcggcttaaaagggcaacccgcgcgggacccttcctccctagtcgcggggagtctgagaaagcgcgcctgtttcgcgaccatcacgcacctcccctccgcttgtggccatgtaccgctacctgggcgaagcgctgttgctgtcccgggccgggcccgctgccctgggctcggcgtccgccgactcggccgcgttgctgggctgggcccggggacagcccgccgccgccccgcagccggggctggcattggccgcccggcgccactacagcgaggcggtggccgaccgcgaggacgaccccaacttcttcaagatggtggagggcttcttcgatcgcggcgccagcatcgtggaggacaagctggtggaggacctgaggacccgggagagcgaggagcagaagcggaaccgggtgcgcggcatcctgcggatcatcaagccctgcaaccatgtgctgagtctctccttccccatccggcgcgacgacggctcctgggaggtcatcgaaggctaccgggcccagcacagccagcaccgcacgccctgcaagggaggtatccgttacagcactgatgtgagtgtagatgaagtaaaagctttggcttctctgatgacatacaagtgtgcagtggttgatgtgccgtttgggggtgctaaagctggtgttaagatcaatcccaagaactatactgataatgaattggaaaagatcacaaggaggttcaccatggagctagcaaaaaagggctttattggtcctggcattgatgtgcctgctccagacatgagcacaggtgagcgggagatgtcctggatcgctgatacctatgccagcaccatagggcactatgatattaatgcacacgcctgtgttactggtaaacccatcagccaagggggaatccatggacgcatctctgctactggccgtggtgtcttccatgggattgaaaatttcatcaatgaagcttcttacatgagcattttaggaatgacaccagggtttggagataaaacatttgttgttcagggatttggtaatgtgggcctacactctatgagatatttacatcgttttggtgctaaatgtattgctgttggtgagtctgatgggagtatatggaatccagatggtattgacccaaaggaactggaagacttcaaattgcaacatgggtccattctgggcttccccaaggcaaagccctatgaaggaagcatcttggaggccgactgtgacatactgatcccagctgccagtgagaagcagttgaccaaatccaacgcacccagagtcaaagccaagatcattgctgaaggtgccaatgggccaacaactccagaagctgacaagatcttcctggagagaaacattatggttattccagatctctacttgaatgctggaggagtgacagtatcttactttgagtggctgaagaatctaaatcatgtcagctatggccgtttgaccttcaaatatgaaagggattctaactaccacttgctcatgtctgttcaagagagtttagaaagaaaatttggaaagcatggtggaactattcccattgtacccacggcagagttccaagacaggatatcgggtgcatctgagaaagacatcgtgcactctggcttggcatacacaatggagcgttctgccaggcaaattatgcgcacagccatgaagtataacctgggattggacctgagaacagctgcctatgttaatgccattgagaaagtcttcaaagtgtacaatgaagctggtgtgaccttcacatagatggatcatggctgacttcctcactatcctcttcacatgtaacttctgcagacctatcacaagtttacatgtaaccacagaaatccctttctctcctgactcattaataatggataccattctcaacaagtcaatccaagtcagcccgttaaggagaaagaaattaaggttagcggatcatgtacaagctgagtgtgaaagtagaaatcacctacaccagagagccattttggtattttgcctttaaataaaaagcctcctttatctggctagcagtcagttgcttgcttattttttctggatgagtctgggacacactgtaactttaacactttctgtttatgaatattattcttttagaatagaataagtacatgctgctgtaataaaattgcctttaatcacttaacaagcctaaccttgactcaaacagtgaatgcctatagaaataataaatgaaaaaaactagtatttttatatcataaaacaatgtcatttatagcttatcattcatgtattgtccagcagacattaaaagccctgtggataattaagttatcttcatacctgcaaaatggtggaggctattttcattaaaactgtcagaatttgcttactataattatgatacagtccaaagaatgcagtcactttttatcatgttaactaattgttctcttttgaagatctatggttgactaattaaacaataattcaagtagagtgtcccagaaaaaaaccacttgggctccctgtttggagtctggctggctctgagcattgccaatggcccctactcacctgactttgtatcctctccttttagaggctttgcattctgcacccagcttcactaacagtgggctgaaaacatccttgggttgagtgtttcatttgggagttatttggccagggccttttgaacagtagtgtccccatgaagtgctagataatatatgtgtaagagtcagctttttttttttttttaactctaacacccttcagaaatttctaactactttgtaactgcatggcttaacctggtgataaaagcagttattaaaagtctacgttttccaaaa

SEQ ID NO: 864 - DNA, 3384 bp, Homo sapiens
ggcgccgtacgtgcgcgcgcgcggcggcccagaaagcggcgctgggaccctgaggcggccgtggttaggcggctccccggcggctcctccgcggcggtgacggcgaccgcactccccgcttcccgctccccgcgctcctccgcccgggtccgccagccgaggccgctcccgagcgtcggaagatgccggccgtgtccaagggggacgggatgcggggcctggcggtcttcatgctcggatatccgcaactgtaaaagtaaagaagcagaaataaaaaggataaacaaggaactggcaaatatcagatcaaaatttaaaggtgacaaggctcttgatggctatagtaaaaaaaagtacgtctgcaagttgctcttcatctttctccttggtcatgacattgactttggacacatggaggctgtgaacctgctgagttcaaacagatacacggaaaagcagatcggctaccttttcatctctgtgttggtgaactcaaacagtgagctgatccgcctgatcaacaacgccatcaagaatgacctggccagccgcaaccccaccttcatgggcctggccctgcactgcatcgccagcgtgggcagccgggagatggccgaggccttcgccggggagatccctaaggtcctcgtagccggagacactatggacagcgtgaagcagagcgcggccctgtgcttgctgcgcctgtacaggacgtcccccgatcttgtccccatgggcgactggacatcccgagtggtgcacctgctcaatgaccagcacttgggtgtggtaactgcagccacaagtctgatcaccactttagcacagaagaacccagaagagtttaaaacctccgtgtctctggctgtctctaggctaagcagaatcgtgacgtctgcatccacagatctccaggattacacttactattttgtcccggctccctggctgtctgtcaaactgctgagactgctgcagtgctacccacccccagaagaccctgcagtgcgaggccgcctgactgagtgcctggagaccatcctgaacaaagcccaagaaccgcccaagtcgaagaaggtccagcactccaacgcgaagaatgccgtgctcttcgaggccatcagcttaatcattcaccatgacagtgagccgaacctgctcgtccgtgcctgcaaccagttgggccagtttctgcagcaccgcgagaccaacctgcgctacctggccctggagagcatgtgcacgctggccagctctgagttctcccatgaggctgtcaagacgcacatcgagacggtcatcaacgccctgaaggcgaactgagcgggacgtgagcgtgcggcagcgggccgtggacctcctctacgccatgtgcgaccgcagcaacgccccacagatcgtggccgagatgctgagctatctggagacagctgactactccatccgagaagagattgtgctgaaggtcgccatcctggctgagaagtacgcggtggactacacctggtatgtggataccatcttgaacttgatccgaattgctggtgattacgtgagtgaagaggtgtggtaccgagtcattcagatcgtcatcaaccgggacgacgtgcagggctacgcggccaagactgtgttcgaggctcttcaggctcccgcgtgccacgagaacctggtcaaagtgggcggctacatcctgggggagtttggaaacttgatagctggagacccgagatccagcccgctgatccagttccacctgctgcactccaagttccacctgtgcagcgtccccacccgcgcgctgctcctgtccacctacatcaagttcgtgaacctcttcccggaggtgaagcccaccatccaggacgtgctgcgcagcgacagccagctcaggaacgcagacgtggagctgcagcagcgtgctgtggagtacctgcggctcagcaccgtggccagcaccgacattctggcgaccgtgctggaggagatgcccccattcccggagcgggagtcctccatcttggcaaagctcaagaagaagaagggccccagcacggtgacagacctggaggacaccaagcgggacaggagtgtggacgtgaacgggggtcctgagcctgccccagccagtaccagcgccgtgtctacgccttctccgtcggcagacctgctgggtctcggggctgccccccctgcccccgcgggccccccaccctcctccggcggcagcgggctgctcgtggacgtgttctcagactcggcctctgtggtcgcgcctctcgctcctggctccgaagacaactttgccaggtttgtttgtaaaaacaatggtgtgttgtttgaaaaccagctgcttcaaattggacttaagtctgaatttcggcagaatttaggtcggatgtttatcttttatggtaataagacctccacgcagttcctaaactttaccccaacactaatctgttcagacgaccttcagcctaatatcctggattccttaacgcacgcacacctgaacctgcagaccaagcccgtggacccgaccgtggaggggggcgcgcaggtgcagcaggtggtcaacatagagtgcgtgtccgacttcacggaggcgccagtcctcaacattcagttcaggtatgggggcaccttccagaacgtgtctgtgcagctgcccatcactctcaacaaattcttccagccgacagaaatggcttctcaggatttctttcaacgttggaagcagttgagcaatccacagcaggaagtgcagaacatcttcaaagcaaagcacccaatggacacagaagtcaccaaagccaagatcattggatttggttctgcacttcttgaagaagttgatcctaatcctgcgaatttcgtgggagctggaatcatccacacgaaaaccacccagattggatgcctgctgcgcttggagccgaacctgcaagcccagatgtaccggctcacgctgcgcacaagtaaggaagccgtttctcagagattatgtgaattgctctcagcgcagttttagtcctgaggatggaagaccaggctcgtgtgtcttgtgttgtcttcgtctgtgccgtttgtcttcgtggccatccttgtggctcaggaggaaaagctcagcctggactgtggcagccacggcagaaggtggatcttgggatcaatttttataaaaatcgagacagttctgtggttaaatctacaaattaaagggaaattagaagttggcgtgaacgtggcgtttgtgggagtgtcactgagatggcccgtgctgccgctgctccccgaggcaccgcttccctgtgcggcgctgcagaggggccctcagtgtggcactcctcgtcaaagaaaaataaaggctagaactgc

SEQ ID NO: 865 - DNA, 3275 bp, Homo sapiens
ctgggaccctgaggcggccgtggttaggcggctccccggcggctcctccgcggcggtgacggcgaccgcactccccgcttcccgctccccgcgctcctccgcccgggtccgccagccgaggccgctcccgagcgtcggaagatgccggccgtgtccaagggggacgggatgcggggcctggcggtcttcatctcggatatccgcaactgtaaaagtaaagaagcagaaataaaaaggataaacaaggaactggcaaatatcagatcaaaatttaaaggtgacaaggctcttgatggctatagtaaaaaaaagtacgtctgcaagttgctcttcatctttctccttggtcatgacattgactttggacacatggaggctgtgaacctgctgagttcaaacagatacacggaaaagcagatcggctaccttttcatctctgtgttggtgaactcaaacagtgagctgatccgcctgatcaacaacgccatcaagaatgacctggccagccgcaaccccaccttcatgggcctggccctgcactgcatcgccagcgtgggcagccgggagatggccgaggccttcgccggggagatccctaaggtcctcgtagccggagacactatggacagcgtgaagcagagcgcggccctgtgcttgctgcgcctgtacaggacgtcccccgatcttgtccccatgggcgactggacatcccgagtggtgcacctgctcaatgaccagcacttgggtgtggtaactgcagccacaagtctgatcaccactttagcacagaagaacccagaagagtttaaaacctccgtgtctctggctgtctctaggctaagcagaatcgtgacgtctgcatccacagatctccaggattacacttactattttgtcccggctccctggctgtctgtcaaactgctgagactgctgcagtgctacccacccccagaccctgcagtgcgaggccgcctgactgagtgcctggagaccatcctgaacaaagcccaagaaccgcccaagtcgaagaaggtccagcactccaacgcgaagaatgccgtgctcttcgaggccatcagcttaatcattcaccatgacagtgagccgaacctgctcgtccgtgcctgcaaccagttgggccagtttctgcagcaccgcgagaccaacctgcgctacctggccctggagagcatgtgcacgctggccagctctgagttctcccatgaggctgtcaagacgcacatcgagacggtcatcaacgccctgaagactgagcgggacgtgagcgtgcggcagcgggccgtggacctcctctacgccatgtgcgaccgcagcaacgccccacagatcgtggccgagatgctgagctatctggagacagctgactactccatccgagaagagattgtgctgaaggtcgccatcctggctgagaagtacgcggtggactacacctggtatgtggataccatcttgaacttgatccgaattgctggtgattacgtgagtgaagaggtgtggtaccgagtcattcagatcgtcatcaaccgggacgacgtgcagggctacgcggccaagactgtgttcgaggctcttcaggctcccgcgtgccacgagaacctggtcaaagtgggcggctacatcctgggggagtttggaaacttgatagctggagacccgagatccagcccgctgatccagttccacctgctgcactccaagttccacctgtgcagcgtccccacccgcgcgctgctcctgtccacctacatcaagttcgtgaacctcttcccggaggtgaagcccaccatccaggacgtgctgcgcagcgacagccagctcaggaacgcagacgtggagctgcagcagcgtgctgtggagtacctgcggctcagcaccgtggccagcaccgacattctggcgaccgtgctggaggagatgcccccattcccggagcgggagtcctccatcttggcaaagctcaagaagaagaagggccccagcacggtgacagacctggaggacaccaagcgggacaggagtgtggacgtgaacgggggtcctgagcctgccccagccagtaccagcgccgtgtctacgccttctccgtcggcagacctgctgggtctcggggctgccccccctgcccccgcgggccccccaccctcctccggcggcagcgggctgctcgtggacgtgttctcagactcggcctctgtggtcgcgcctctcgctcctggctccgaagacaactttgccaggtttgtttgtaaaaacaatggtgtgttgtttgaaaaccagctgcttcaaattggacttaagtctgaatttcggcagaatttaggtcggatgtttatcttttatggtaataagacctccacgcagttcctaaactttaccccaacactaatctgttcagacgaccttcagcctaacctgaacctgcagaccaagcccgtggacccgaccgtggaggggggcgcgcaggtgcagcaggtggtcaacatagagtgcgtgtccgacttcacggaggcgccagtcctcaacattcagttcaggtatgggggcaccttccagaacgtgtctgtgcagctgcccatcactctcaacaaattcttccagccgacagaaatggcttctcaggatttctttcaacgttggaagcagttgagcaatccacagcaggaagtgcagaacatcttcaaagcaaagcacccaatggacacagaagtcaccaaagccaagatcattggatttggttctgcacttcttgaagaagttgatcctaatcctgcgaatttcgtgggagctggaatcatccacacgaaaaccacccagattggatgcctgctgcgcttggagccgaacctgcaagcccagatgtaccggctcacgctgcgcacaagtaaggaagccgtttctcagagattatgtgaattgctctcagcgcagttttagtcctgaggatggaagaccaggcttgtgtgtcttgtgttgtcttcgtctgtgccgtttgtcttcgtggccatcctgcagatgagcaccgtgtccagtgccacagcacaaggcgcctccccgccccgccgccccacacctctcccctttgggctggacgggaacacacgtgtgtggctcaggaggaaaagctcagcctggactgtggcagccacggcagaaggtggatcttgggatcaatttttataaaaatcgagacagttctgtggttaaatctacaaattaaagggaaattagaaaaaaaaaaaaaaaaaaaa

SEQ ID NO: 866 - DNA, 3446 bp, Homo sapiens
gttctgtggacaatcacaatgggaatccaaggagggtctgtcctgttcgggctgctgctcgtcctggctgtcttctgccattcaggtcatagcctgcagtgctacaactgtcctaacccaactgctgactgcaaaacagccgtcaattgttcatctgattttgatgcgtgtctcattaccaaagctgggttacaagtgtataacaagtgttggaagtttgagcattgcaatttcaacgacgtcacaacccgcttgagggaaaatgagctaacgtactactgctgcaagaaggacctgtgtaactttaacgaacagcttgaaaatggtgggacatccttatcagagaaaacagttcttctgctggtgactccatttctggcagcagcctggagccttcatccctaagtcaacaccaggagagcttctcccaaactccccgttcctgcgtagtccgctttctcttgctgccacattctaaaggcttgatattttccaaatggatcctgttgggaaagaataaaattagcttgagcaacctggctaagatagaggggctctgggagactttgaagaccagtcctgtttgcagggaagccccacttgaaggaagaagtctaagagtgaagtaggtgtgacttgaactagattgcatgcttcctcctttgctcttgggaagaccagctttgcagtgacagcttgagtgggttctctgcagccctcagattatttttcctctggctccttggatgtagtcagttagcatcattagtacatctttggagggtggggcaggagtatatgagcatcctctctcacatggaacgctttcataaacttcagggatcccgtgttgccatggaggcatgccaaatgttccatatgtgggtgtcagtcagggacaacaagatccttaatgcagagctagaggacttctggcagggaagtggggaagtgttccagatagcagggcatgaaaacttagagaggtacaagtggctgaaaatcgagtttttcctctgtctttaaattttatatgggctttgttatcttccactggaaaagtgtaatagcatacatcaatggtgtgttaaagctatttccttgccttttttttattggaatggtaggatatcttggctttgccacacacagttacagagtgaacactctactacatgtgactggcagtattaagtgtgcttattttaaatgttactggtagaaaggcagttcaggtatgtgtgtatatagtatgaatgcagtggggacaccctttgtggttacagtttgagacttccaaaggtcatccttaataacaacagatctgcaggggtatgttttaccatctgcatccagcctcctgctaactcctagctgactcagcatagattgtataaaatacctttgtaacggctcttagcacactcacagatgtttgaggctttcagaagctcttctaaaaaatgatacacacctttcacaagggcaaactttttccttttccctgtgtattctagtgaatgaatctcaagattcagtagacctaatgacatttgtattttatgatcttggctgtatttaatggcataggctgacttttgcagatggaggaatttcttgattaatgttgaaaaaaaacccttgattatactctgttggacaaaccgagtgcaatgaatgatgcttttctgaaaatgaaatataacaagtgggtgaatgtggttatggccgaaaaggatatgcagtatgcttaatggtagcaactgaaagaagacatcctgagcagtgccagctttcttctgttgatgccgttccctgaacataggaaaatagaaacttgcttatcaaaacttagcattaccttggtgctctgtgttctctgttagctcagtgtctttccttacatcaataggtttttttttttttttttggcctgaggaagtactgaccatgcccacagccaccggctgagcaaagaagctcatttcatgtgagttctaaggaatgagaaacaattttgatgaatttaagcagaaaatgaatttctgggaacttttttgggggcgggggggtggggaattcagccacactccagaaagccaggagtcgacagttttggaagcctctctcaggattgagattctaggatgagattggcttactgctatcttgtgtcatgtacccactttttggccagactacactgggaagaaggtagtcctctaaagcaaaatctgagtgccactaaatggggagatggggctgttaagctgtccaaatcaacaagggtcatataaatggccttaaactttggggttgctttctgcaaaaagttgctgtgactcatgccatagacaaggttgagtgcctggacccaaaggcaatactgtaatgtaaagacatttatagtactaggcaaacagcaccccaggtactccaggccctcctggctggagagggctgtggcaatagaaaattagtgccaactgcagtgagtcagcctaggttaaatagagagtgtaagagtgctggacaggaacctccaccctcatgtcacatttcttcaatgtgacccttctggcccctctcctcctgacagcggaacaatgactgccccgataggtgaggctggaggaagaatcagtcctgtccttggcaagctcttcactatgacagtaaaggctctctgcctgctgccaaggcctgtgactttctaacctggcctcacgctgggtaagcttaaggtagaggtgcaggattagcaagcccacctggctaccaggccgacagctacatcctccaactgaccctgatcaacgaagagggattcatgtgtctgtctcagttggttccaaatgaaaccagggagcaggggagttaggaatcgaacaccagtcatgcctactggctctctgctcgagagccaataccctgtgccctccactcatctggatttacaggaactgtcatagtgttcagtattgggtggtgataagcccattggattgtccccttggggggatgagctaggggtgcaaggaacacctgatgagtagataagtggagctcatggtatttcctgaaagatgctaatctatttgccaaacttggtcttgaatgtactgggggcttcaaggtatgggtatatttttcttgtgtccttgcagttagcccccatgtcttatgtgtgtcctgaaaaaataagagcctgcccaagactttgggcctcttgacagaattaaccacttttatacatctgagttctcttggtaagttctttagcagtgttcaaagtctactagctcgcattagtttctgttgctgccaacagatctgaactaatgctaacagatccccctgagggattcttgatgggctgagcagctggctggagctagtactgactgacattcattgtgatgagggcagctttctggtacaggatt

SEQ ID NO: 867 - DNA, 5069 bp, Homo sapiens
cgggctggagcgaaagaatgcgggggctgagcgcagaagcggctcgaggctggaagaggatcttgggcgccgccaggttctgtggacaatcacaatgggaatccaaggagggtctgtcctgttcgggctgctgctcgtcctggctgtcttctgccattcaggtgagtcatagcctgcagtgctacaactgtcctaacccaactgctgactgcaaaacagccgtcaattgttcatctgattttgatgcgtgtctcattaccaaagctgggttacaagtgtataacaagtgttggaagtttgagcattgcaatttcaacgacgtcacaacccgcttgagggaaaatgagctaacgtactactgctgcaagaaggacctgtgtaactttaacgaacagcttgaaaatggtgggacatccttatcagagaaaacagttcttctgctggtgactccatttctggcagcagcctggagccttcatccctaagtcaacaccaggagagcttctcccaaactccccgttcctgcgtagtccgctttctcttgctgccacattctaaaggcttgatattttccaaatggatcctgttgggaaagaataaaattagcttgagcaacctggctaagatagaggggctctgggagactttgaagaccagtcctgtttgcagggaagccccacttgaaggaagaagtctaagagtgaagtaggtgtgacttgaactagattgcatgcttcctcctttgctcttgggaagaccagctttgcagtgacagcttgagtgggttctctgcagccctcagattatttttcctctggctccttggatgtagtcagttagcatcattagtacatctttggagggtggggcaggagtatatgagcatcctctctcacatggaacgctttcataaacttcagggatcccgtgttgccatggaggcatgccaaatgttccatatgtgggtgtcagtcagggacaacaagatccttaatgcagagctagaggacttctggcagggaagtggggaagtgttccagatagcagggcatgaaaacttagagaggtacaagtggctgaaaatcgagtttttcctctgtctttaaattttatatgggctttgttatcttccactggaaaagtgtaatagcatacatcaatggtgtgttaaagctatttccttgccttttttttattggaatggtaggatatcttggctttgccacacacagttacagagtgaacactctactacatgtgactggcagtattaagtgtgcttattttaaatgttactggtagaaaggcagttcaggtatgtgtgtatatagtatgaatgcagtggggacaccctttgtggttacagtttgagacttccaaaggtcatccttaataacaacagatctgcaggggtatgttttaccatctgcatccagcctcctgctaactcctagctgactcagcatagattgtataaaatacctttgtaacggctcttagcacactcacagatgtttgaggctttcagaagctcttctaaaaaatgatacacacctttcacaagggcaaactttttccttttccctgtgtattctagtgaatgaatctcaagattcagtagacctaatgacatttgtattttatgatcttggctgtatttaatggcataggctgacttttgcagatggaggaatttcttgattaatgttgaaaaaaaacccttgattatactctgttggacaaaccgagtgcaatgaatgatgcttttctgaaaatgaaatataacaagtgggtgaatgtggttatggccgaaaaggatatgcagtatgcttaatggtagcaactgaaagaagacatcctgagcagtgccagctttcttctgttgatgccgttccctgaacataggaaaatagaaacttgcttatcaaaacttagcattaccttggtgctctgtgttctctgttagctcagtgtctttccttacatcaataggtttttttttttttttttggcctgaggaagtactgaccatgcccacagccaccggctgagcaaagaagctcatttcatgtgagttctaaggaatgagaaacaattttgatgaatttaagcagaaaatgaatttctgggaacttttttgggggcgggggggtggggaattcagccacactccagaaagccaggagtcgacagttttggaagcctctctcaggattgagattctaggatgagattggcttactgctatcttgtgtcatgtacccactttttggccagactacactgggaagaaggtagtcctctaaagcaaaatctgagtgccactaaatggggagatggggctgttaagctgtccaaatcaacaagggtcatataaatggccttaaactttggggttgctttctgcaaaaagttgctgtgactcatgccatagacaaggttgagtgcctggacccaaaggcaatactgtaatgtaaagacatttatagtactaggcaaacagcaccccaggtactccaggccctcctggctggagagggctgtggcaatagaaaattagtgccaactgcagtgagtcagcctaggttaaatagagagtgtaagagtgctggacaggaacctccaccctcatgtcacatttcttcaatgtgacccttctggcccctctcctcctgacagcggaacaatgactgccccgataggtgaggctggaggaagaatcagtcctgtccttggcaagctcttcactatgacagtaaaggctctctgcctgctgccaaggcctgtgactttctaacctggcctcacgctgggtaagcttaaggtagaggtgcaggattagcaagcccacctggctaccaggccgacagctacatcctccaactgaccctgatcaacgaagagggattcatgtgtctgtctcagttggttccaaatgaaaccagggagcaggggagttaggaatcgaacaccagtcatgcctactggctctctgctcgagtggtgataagcccattggattgtccccttggggggatgagctaggggtgcaaggaacacctgatgagtagataagtggagctcatggtatttcctgaaagatgctaatctatttgccaaacttggtcttgaatgtactgggggcttcaaggtatgggtatatttttcttgtgtccttgcagttagcccccatgtcttatgtgtgtcctgaaaaaataagagcctgcccaagactttgggcctcttgacagaattaaccacttttatacatctgagttctcttggtaagttctttagcagtgttcaaagtctactagctcgcattagtttctgttgctgccaacagatctgaactaatgctaacagatccccctgagggattcttgatgggctgagcagctggctggagctagtactgactgacattcattgtgatgagggcagctttctggtacaggattctaagctctatgttttctatacattttcatctgtacttgcacctcactttacacaagaggaaactatgcaaagttagctggatcgctcaaggtcacttaggtaagttggcaagtccatgcttcccactcagctcctcaggtcagcaagtctacttctctgcctattttgtatactctctttaatatgtgcctagctttggaaagtctagaatgggtccctggtgcctttttactttgaagaaatcagtttctgcctctttttggaaaagaaaacaaagtgcaattgttttttactggaaagttacccaatagcatgaggtgaacaggacgtagttaggccttcctgtaaacagaaaatcatatcaaaacactatcttcccatctgtttctcaatgcctgctacttcttgtagatatttcatttcaggagagcagcagttaaacccgtggattttgtagttaggaacctgggttcaaaccctcttccactaattggctatgtctctggacaagtttttttttttttttttttttaaaccctttctgaactttcactttctatgtctacctcaaagaattgttgtgaggcttgagataatgcatttgtaaagggtctgccagataggaagatgctagttatggatttacaaggttgttaaggctgtaagagtctaaaacctacagtgaatcacaatgcatttacccccactgacttggacataagtgaaaactagccagaagtctctttttcaaattacttacaggttattcaatataaaatttttgtaatggataatcttatttatctaaactaaagcttcctgtttatacacactcctgttattctgggataagataaatgaccacagtaccttaatttctaggtgggtgcctgtgatggttcattgtaggtaaggacattttctctttttcagcagctgtgtaggtccagagcctctgggagaggaggggggtagcatgcacccagcaggggactgaactgggaaactcaaggttctttttactgtggggtagtgagctgcctttctgtgatcggtttccctagggatgttgctgttcccctccttgctattcgcagctacatacaacgtggccaaccccagtaggctgatcctatatatgatcagtgctggtgctgactctcaatagccccacccaagctggctataggtttacagatacattaattaggcaacctaaaatattgatgctggtgttggtgtgacataatgctatggccagaactgaaacttagagttataattcatgtattagggttctccagagggacagaattagtaggatatatgtatatatgaaagggaggttattagggagaactggctcccacagttagaaggcgaagtcgcacaataggccgtctgcaagctgggttagagagaagccagtagtggctcagcctgagttcaaaaacctcaaaactggggaagctgacagtgcagccagccttcagtctgtggccaaaggcccaagagcccctggcaaccaacccactggtgcaagtcctagattccaaaggctgaagaacctggagtctgatgtccaagagcaggaagagtggaagaaa

SEQ ID NO: 868 - DNA, 524 bp, Homo sapiens
aagcttcctaattgcacagttagatggatattcaaatgtggatatttcctttgtgcttgcatcagggtccaaaaatgttgctggaactgtagtttgaatttggaaagatataactgctatacatttgtgcgggagtggaatgataccacaagttgctgactttgggcccatattaatggagatggtgggctgccaggggacaagtcagtgctgctttaagagatcctgactttcttcctgattctaggtcatagcctgcagtgctacaactgtcctaacccaactgctgactgcaaaacagccgtcaattgttcatctgattttgatgcgtgtctcattaccaaagctggtaagagcctcccctgtctgtctcctaaatgtaatggggtaataagtgcctgggaaaaaaattgtgccactgtaatcctcattaggcttgcatcaagtaatagctaccatttattagcgtcaggtgtgtattgggctaagcacttcttcatacattttaaatttaatgttttgca

SEQ ID NO: 869 - DNA, 3653 bp, Homo sapiens
gcgcagaagcggctcgaggctggaagaggatcttgggcgccgccagtctctctctgttgcccaagctggagtgcagtggcacagtcttggctcactgcaacctccacctcctgggtgcaagcgattctcgtgtctcagcctctcaagtagctgggattacagtctttagcaccagttggtgtaggagttgagacctacttcacagtagttctgtggacaatcacaatgggaatccaaggagggtctgtcctgttcgggctgctgctcgtcctggctgtcttctgccattcaggtcatagcctgcagtgctacaactgtcctaacccaactgctgactgcaaaacagccgtcaattgttcatctgattttgatgcgtgtctcattaccaaagctgggttacaagtgtataacaagtgttggaagtttgagcattgcaatttcaacgacgtcacaacccgcttgagggaaaatgagctaacgtactactgctgcaagaaggacctgtgtaactttaacgaacagcttgaaaatggtgggacatccttatcagagaaaacagttcttctgctggtgactccatttctggcagcagcctggagccttcatccctaagtcaacaccaggagagcttctcccaaactccccgttcctgcgtagtccgctttctcttgctgccacattctaaaggcttgatattttccaaatggatcctgttgggaaagaataaaattagcttgagcaacctggctaagatagaggggctctgggagactttgaagaccagtcctgtttgcagggaagccccacttgaaggaagaagtctaagagtgaagtaggtgtgacttgaactagattgcatgcttcctcctttgctcttgggaagaccagctttgcagtgacagcttgagtgggttctctgcagccctcagattatttttcctctggctccttggatgtagtcagttagcatcattagtacatctttggagggtggggcaggagtatatgagcatcctctctcacatggaacgctttcataaacttcagggatcccgtgttgccatggaggcatgccaaatgttccatatgtgggtgtcagtcagggacaacaagatccttaatgcagagctagaggacttctggcagggaagtggggaagtgttccagatagcagggcatgaaaacttagagaggtacaagtggctgaaaatcgagtttttcctctgtctttaaattttatatgggctttgttatcttccactggaaaagtgtaatagcatacatcaatggtgtgttaaagctatttccttgccttttttttattggaatggtaggatatcttggctttgccacacacagttacagagtgaacactctactacatgtgactggcagtattaagtgtgcttattttaaatgttactggtagaaaggcagttcaggtatgtgtgtatatagtatgaatgcagtggggacaccctttgtggttacagtttgagacttccaaaggtcatccttaataacaacagatctgcaggggtatgttttaccatctgcatccagcctcctgctaactcctagctgactcagcatagattgtataaaatacctttgtaacggctcttagcacactcacagatgtttgaggctttcagaagctcttctaaaaaatgatacacacctttcacaagggcaaactttttccttttccctgtgtattctagtgaatgaatctcaagattcagtagacctaatgacatttgtattttatgatcttggctgtatttaatggcataggctgacttttgcagatggaggaatttcttgattaatgttgaaaaaaaacccttgattatactctgttggacaaaccgagtgcaatgaatgatgcttttctgaaaatgaaatataacaagtgggtgaatgtggttatggccgaaaaggatatgcagtatgcttaatggtagcaactgaaagaagacatcctgagcagtgccagctttcttctgttgatgccgttccctgaacataggaaaatagaaacttgcttatcaaaacttagcattaccttggtgctctgtgttctctgttagctcagtgtctttccttacatcaataggtttttttttttttttttggcctgaggaagtactgaccatgcccacagccaccggctgagcaaagaagctcatttcatgtgagttctaaggaatgagaaacaattttgatgaatttaagcagaaaatgaatttctgggaacttttttgggggcgggggggtggggaattcagccacactccagaaagccaggagtcgacagttttggaagcctctctcaggattgagattctaggatgagattggcttactgctatcttgtgtcatgtacccactttttggccagactacactgggaagaaggtagtcctctaaagcaaaatctgagtgccactaaatggggagatggggctgttaagctgtccaaatcaacaagggtcatataaatggccttaaactttggggttgctttctgcaaaaagttgctgtgactcatgccatagacaaggttgagtgcctggacccaaaggcaatactgtaatgtaaagacatttatagtactaggcaaacagcaccccaggtactccaggccctcctggctggagagggctgtggcaatagaaaattagtgccaactgcagtgagtcagcctaggttaaatagagagtgtaagagtgctggacaggaacctccaccctcatgtcacatttcttcaatgtgacccttctggcccctctcctcctgacagcggaacaatgactgccccgataggtgaggctggaggaagaatcagtcctgtccttggcaagctcttcactatgacagtaaaggctctctgcctgctgccaaggcctgtgactttctaacctggcctcacgctgggtaagcttaaggtagaggtgcaggattagcaagcccacctggctaccaggccgacagctacatcctccaactgaccctgatcaacgaagagggattcatgtgtctgtctcagttggttccaaatgaaaccagggagcaggggagttaggaatcgaacaccagtcatgcctactggctctctgctcgagagccaataccctgtgccctccactcatctggatttacaggaactgtcatagtgttcagtattgggtggtgataagcccattggattgtccccttggggggatgagctaggggtgcaaggaacacctgatgagtagataagtggagctcatggtatttcctgaaagatgctaatctatttgccaaacttggtcttgaatgtactgggggcttcaaggtatgggtatatttttcttgtgtccttgcagttagcccccatgtcttatgtgtgtcctgaaaaaataagagcctgcccaagactttgggcctcttgacagaattaaccacttttatacatctgagttctcttggtaagttctttagcagtgttcaaagtctactagctcgcattagtttctgttgctgccaacagatctgaactaatgctaacagatccccctgagggattcttgatgggctgagcagctggctggagctagtactgactgacattcattgtgatgagggcagctttctggtacaggatt

SEQ ID NO: 870 - DNA, 1606 bp, Homo sapiens
cgcgcgcgcagcatggcgcccccgcaggtcctcgcgttcgggcttctgcttgccgcggcgacggcgacttttgccgcagctcaggaaggtgaggcgcggattggagcagagttgtggagctgggctgggctggggggcagcggcccccggccctcggcccccgaaacgggcataatagggaggggaccaagaggccgcgctttccagcgtggagaccggacggtgcggccgtgctccggctcaggccctccgcgcggtaggaaacggcgagggccgtcccggggagcagcctcacttcgcagctttgctcgccttgaatgtgtctgtgaaaactacaagctggccgtaaactgctttgtgaataataatcgtcaatgccagtgtacttcagttggtgcacaaaatactgtcatttgctcaaagctggctgccaaatgtttggtgatgaaggcagaaatgaatggctcaaaacttgggagaagagcaaaacctgaaggggccctccagaacaatgatgggctttatgatcctgactgcgatgagagcgggctctttaaggccaagcagtgcaacggcacctccatgtgctggtgtgtgaacactgctggggtcagaagaacagacaaggacactgaaataacctgctctgagcgagtgagaacctactggatcatcattgaactaaaacacaaagcaagagaaaaaccttatgatagtaaaagtttgcggactgcacttcagaaggagatcacaacgcgttatcaactggatccaaaatttatcacgagtattttgtatgagaataatgttatcactattgatctggttcaaaattcttctcaaaaaactcagaatgatgtggacatagctgatgtggcttattattttgaaaaagatgttaaaggtgaatccttgtttcattctaagaaaatggacctgacagtaaatggggaacaactggatctggatcctggtcaaactttaatttattatgttgatgaaaaagcacctgaattctcaatgcagggtctaaaagctggtgttattgctgttattgtggttgtggtgatagcagttgttgctggaattgttgtgctggttatttccagaaagaagagaatggcaaagtatgagaaggctgagataaaggagatgggtgagatgcatagggaactcaatgcataactatataatttgaagattatagaagaagggaaatagcaaatggacacaaattacaaatgtgtgtgcgtgggacgaagacatctttgaaggtcatgagtttgttagtttaacatcatatatttgtaatagtgaaacctgtactcaaaatataagcagcttgaaactggctttaccaatcttgaaatttgaccacaagtgtcttatatatgcagatctaatgtaaaatccagaacttggactccatcgttaaaattatttatgtgtaacattcaaatgtgtgcattaaatatgcttccacagtaaaatctgaaaaactgatttgtgattgaaagctgcctttctatttacttgagtcttgtacatacatacttttttatgagctatgaaataaaacattttaaactgaatttcttaactttga

SEQ ID NO: 871 - DNA, 1651 bp, Homo sapiens
caccagcggccagaggtgagcagtcccgggaaggggccgagaggcggggccgccaggtcgggcaggtgtgcgctccgccccgccgcgcgcacagagcgctagtccttcggcgagcgagcaccttcgacgcggtccggggaccccctcgtcgctgtcctcccgacgcggacccgcgtgccccaggcctcgcgctgcccggccggctcctcgtgtcccactcccggcgcacgccctcccgcgagtcccgggcccctcccgcgcccctcttctcggcgcgcgcgcagcatggcgcccccgcaggtcctcgcgttcgggcttctgcttgccgcggcgacggcgacttttgccgcagctcaggaagaatgtgtctgtgaaaactacaagctggccgtaaactgctttgtgaataataatcgtcaatgccagtgtacttcagttggtgcacaaaatactgtcatttgctcaaagctggctgccaaatgtttggtgatgaaggcagaaatgaatggctcaaaacttgggagaagagcaaaacctgaaggggccctccagaacaatgatgggctttatgatcctgactgcgatgagagcgggctctttaaggccaagcagtgcaacggcacctccatgtgctggtgtgtgaacactgctggggtcagaagaacagacaaggacactgaaataacctgctctgagcgagtgagaacctactggatcatcattgaactaaaacacaaagcaagagaaaaaccttatgatagtaaaagtttgcggactgcacttcagaaggagatcacaacgcgttatcaactggatccaaaatttatcacgagtattttgtatgagaataatgttatcactattgatctggttcaaaattcttctcaaaaaactcagaatgatgtggacatagctgatgtggcttattattttgaaaaagatgttaaaggtgaatccttgtttcattctaagaaaatggacctgacagtaaatggggaacaactggatctggatcctggtcaaactttaatttattatgttgatgaaaaagcacctgaattctcaatgcagggtctaaaagctggtgttattgctgttattgtggttgtggtgatagcagttgttgctggaattgttgtgctggttatttccagaaagaagagaatggcaaagtatgagaaggctgagataaaggagatgggtgagatgcatagggaactcaatgcataactatataatttgaagattatagaagaagggaaatagcaaatggacacaaattacaaatgtgtgtgcgtgggacgaagacatctttgaaggtcatgagtttgttagtttaacatcatatatttgtaatagtgaaacctgtactcaaaatataagcagcttgaaactggctttaccaatcttgaaatttgaccacaagtgtcttatatatgcagatctaatgtaaaatccagaacttggactccatcgttaaaattatttatgtgtaacattcaaatgtgtgcattaaatatgcttccacagtaaaatctgaaaaactgatttgtgattgaaagctgcctttctatttacttgagtcttgtacatacatacttttttatgagctatgaaataaaacattttaaactgaatttcttaactttga

SEQ ID NO: 872 - DNA, 1504 bp, Homo sapiens
gagcgagcaccttcgacgcggtccggggaccccctcgtcgctgtcctcccgacgcggacccgcgtgccccaggcctcgcgctgcccggccggctcctcgtgtcccactcccggcgcacgccctcccgcgcccctcttctcggcgcgcgcgcagcatggcgcccccgcaggtcctcgcgttcgggcttctgcttgccgcggcgacggcgacttttgccgcagctcaggaagaatgtgtctgtgaaaactacaagctggccgtaaactgctttgtgaataataatcgtcaatgccagtgtacttcagttggtgcacaaaatactgtcatttgctcaaagctggctgccaaatgtttggtgatgaaggcagaaatgaatggctcaaaacttgggagaagagcaaaacctgaaggggccctccagaacaatgatgggctttatgatcctgactgcgatgagagcgggctctttaaggccaagcagtgcaacggcacctccacgtgctggtgtgtgaacactgctggggtcagaagaacagacaaggacactgaaataacctgctctgagcgagtgagaacctactggatcatcattgaactaaaacacaaagcaagagaaaaaccttatgatagtaaaagtttgcggactgcacttcagaaggagatcacaacgcgttatcaactggatccaaaatttatcacgagtattttgtatgagaataatgttatcactattgatctggttcaaaattcttctcaaaaaactcagaatgatgtggacatagctgatgtggcttattattttgaaaaagatgttaaaggtgaatccttgtttcattctaagaaaatggacctgacagtaaatggggaacaactggatctggatcctggtcaaactttaatttattatgttgatgaaaaagcacctgaattctcaatgcagggtctaaaagctggtgttattgctgttattgtggttgtggtgatggcagttgttgctggaattgttgtgctggttatttccagaaagaagagaatggcaaagtatgagaaggctgagataaaggagatgggtgagatgcatagggaactcaatgcataactatataatttgaagattatagaagaagggaaatagcaaatggacacaaattacaaatgtgtgtgcgtgggacgaagacatctttgaaggtcatgagtttgttagtttaacatcatatatttgtaatagtgaaacctgtactcaaaatataagcagcttgaaactggctttaccaatcttgaaatttgaccacaagtgtcttatatatgcagatctaatgtaaaatccagaacttggactccatcgttaaaattatttatgtgtaacattcaaatgtgtgcattaaatatgcttccacagtaaaatctgaaaaactgatttgtgattgaaagctgcctttctatttacttgagtcttgtacatacatacttttttatgagctatgaaataaaacattttaaactg

SEQ ID NO: 873 - DNA, 1045 bp, Homo sapiens
actatccggcgccgagccggaggggggaaacggcgcccgccgcccgcccggagcccgcgagcaaccccagtcccccccacccgcgcgtggcggcgccggctccctagccaccgcggccccaccctcttccggcctcagctgtccgggctgctttcgcctccgcctgtggatgctgcgcctctccgaacgcaacatgaaggtgctccttgccgccgccctcatcgcggggtccgtcttcttcctgctgctgccgggaccttctgcggccgatgagaagaagaaggggcccaaagtcaccgtcaaggtgtattttgacctacgaattggagatgaagatgtaggccgggtgatctttggtctcttcggaaagactgttccaaaaacagtggataattttgtggccttagctacaggagagaaaggatttggctacaaaaacagcaaattccatcgtgtaatcaaggacttcatgatccagggcggagacttcaccaggggagatggcacaggaggaaagagcatctacggtgagcgcttccccgatgagaacttcaaactgaagcactacgggcctggctgggtgagcatggccaacgcaggcaaagacaccaacggctcccagttcttcatcacgacagtcaagacagcctggctagatggcaagcatgtggtgtttggcaaagttctagagggcatggaggtggtgcggaaggtggagagcaccaagacagacagccgggataaacccctgaaggatgtgatcatcgcagactgcggcaagatcgaggtggagaagccctttgccatcgccaaggagtagggcacagggacatctttctttgagtgaccgtctgtgcaggccctgtagtccgccacagggctctgagctgcactggccccggtgctggcatctggtggagcggacccactcccctcacattccacaggcccatggactcacttttgtaacaaactcctaccaacactgaccaataaaaaaaaatgtgggtttttttttttttaatataaaaaaaaaaaaaaaaaa

SEQ ID NO: 874 - DNA, 1598 bp, Homo sapiens
gaaacggcgcccgccgcccgcccggagcccgcgagcaaccccagtcccccccacccgcgcgtggcggcgccggctccctagccaccgcggccccaccctcttccggcctcagctgtccgggctgctttcgcctccgcctgtggatgctgcgcctctccgaacgcaacatgaaggtgctccttgccgccgccctcatcgcggggtccgtcttcttcctgctgctgccgggaccttctgcggccgatgagaagaagaaggggcccaaagtcaccgtcaaggtgtattttgacctacgaattggagatgaagatgtaggccgggtgatctttggtctcttcggaaagactgttccaaaaacagtggataattttgtggccttagctacaggagagaaaggatttggctacaaaaacagcaaattccatcgtgtaatcaaggacttcatgatccagggcggagacttcaccaggggagatggcacaggaggaaagagcatctacggtgagcgcttccccgatgagaacttcaaactgaagcactacgggcctggctgggtgagcatggccaacgcaggcaaagacaccaacggctcccagttcttcatcacgacagtcaagacagcctggctagatggcaagcatgtggtgtttggcaaagttctagagggcatggaggtggtgcggaaggtggagagcaccaagacagacagccgggataaacccctgaaggatgtgatcatcgcagactgcggcaagatcgaggtggagaagccctttgccatcgccaaggagtagggcacagggacatctttctttgagtgaccgtctgtgcaggccctgtagtccgccacagggctctgagctgcactggccccggtgctggcatctggtggagcggacccactcccctcacattccacaggcccatggactcacttttgtaacaaactcctaccaacactgaccaataaaaaaaaatgtgggttttttttttttttaatatataatgtgtgggcctggttcttgagcctgcagcacctcccctaggcctacatcccaacatgcctgcaactctcctgtggcaatgggtgcctgccccttccctgggatcctgcctgaaattttgacccaggagctacccaggaaaagtcaggcaggagcttttgccccctgcttctaaactttgccagctactgggcctccacatttgctccccttgccaccaccctccagtctatgttaagggatgtatctgtactttttcatagcctacctctaaattgattttttttttttttttggtagagacaggtctcactatgttgcgctggctggtctcaaacttccagacccaagcatcctcctgccttggcctcctaaagtattgggattacaggcatgagcctctgcacccagctgacttcttcctttattatttatttattttgagacggagtttcactcttgttgcccaggctggagtgcagtggcgcgatctcggctcaccacaacttccgcctcctggcttcaagagattctcctgccttgggccgggcgcggtggctcacgcctgtaatcccagcactttgggaggccgag

SEQ ID NO: 875 - DNA, 833 bp, Homo sapiens
gaaggtgctccttgccgccgccctcatcgcggggtccgtcttcttcctgctgctgccgggaccttctgcggccgatgagaagaagaaggggcccaaagtcaccgtcaaggtgtattttgacctacgaattggagatgaagatgtaggccgggtgatctttggtctctttggaaagactgttccaaaaacagtggataattttgtggccttagctacaggagagaaaggatttggctacaaaaacagcaaattccatcgtgtaatcaaggacttcatgatccagggcggagacttcaccaggggagatggcacaggaggaaagagcatctacggtgagcgcttccccgatgagaacttcaaactgaagcactacgggcctggctgggtgagcatggccaacgcaggcaaagacaccaacggctcccagttcttcatcacgacagtcaagacagcctggctagatggcaagcatgtggtgtttggcaaagttctagagggcatggaggtggtgcggaaggtggagagcaccaagacagacagccgggataaacccctgaaggatgtgatcatcgcagactgcggcaagatcgaggtggagaagccctttgccatcgccaaggagtagggcacagggacatctttctttgagtgaccgtctgtgcaggccctgtagtccgccacagggctctgagctgcactggccccggtgctggcatctggtggagcggacccactcccctcacattccacaggcccatggactcacttttgtaacaaactcctaccaacactgaccaataaaaaaaaatgtgggtttttttttttaataaaag

SEQ ID NO: 876 - DNA, 1548 bp, Homo sapiens
gaaacggcgcccgccgcccgcccggagcccgcgagcaaccccagtcccccccacccgcgcgtggcggcgccggctccctagccaccgcggccccaccctcttccggcctcagctgtccgggctgctttcgcctccgcctgtggatgctgcgcctctccgaacgcaacatgaaggtgctccttgccgccgccctcatcgcggggtccgtcttcttcctgctgctgccgggaccttctgcggccgatgagaagaagaaggggcccaaagtcaccgtcaaggtgtattttgacctacgaattggagatgaagatgtaggccgggtgatctttggtctcttcggaaagactgttccaaaaacagtggataattttgtggccttagctacaggagagaaaggatttggctacaaaaacagcaaattccatcgtgtaatcaaggacttcatgatccagggcggagacttcaccaggggagatggcacaggaggaaagagcatctacggtgagcgcttccccgatgagaacttcaaactgaagcactacgggcctggctgggtgagcatggccaacgcaggcaaagacaccaacggctcccagttcttcatcacgacagtcaagacagcctggctagatggcaagcatgtggtgtttggcaaagttctagagggcatggaggtggtgcggaaggtggagagcaccaagacagacagccgggataaacccctgaaggatgtgatcatcgcagactgcggcaagatcgaggtggagaagccctttgccatcgccaaggagtagggcacagggacatctttctttgagtgaccgtctgtgcaggccctgtagtccgccacagggctctgagctgcactggccccggtgctggcatctggtggagcggacccactcccctcacattccacaggcccatggactcacttttgtaacaaactcctaccaacactgaccaataaaaaaaaatgtgggttttttttttttttaatatataatgtgtgggcctggttcttgagcctgcagcacctcccctaggcctacatcccaacatgcctgcaactctcctgtggcaatgggtgcctgccccttccctgggatcctgcctgaaattttgacccaggagctacccaggaaaagtcaggcaggagcttttgccccctgcttctaaactttgccagctactgggcctccacatttgctccccttgccaccaccctccagtctatgttaagggatgtatctgtactttttcatagcctacctctaaattgattttttttttttttttggtagagacaggtctcactatgttgcgctggctggtctcaaacttccagacccaagcatcctcctgccttggcctcctaaagtattgggattacaggcatgagcctctgcacccagctgacttcttcctttattatttatttattttgagacggagtttcactcttgttgcccaggctggagtgcagtggcgcgatctcggctcaccacaacttccgcctcctggcttcaagagattctcctgccttgg

SEQ ID NO: 877 - DNA, 8878 bp, Homo sapiens
gaattcatgccccttttgaaatagacttatgtcattgtcagaaaacataagcatttatggtatatcattaatgagtcacgattttagtggttgccttgtgagtaggtcaaatttactaagcttagatttgttttctcacatattctttcggagcttgtgtagtttccacattaatttaccagaaacaagatacacactctctttgaggagtgccctaacttcccatcattttgtccaattaaatgaattgaagaaatttaatgtttctaaactagaccaacaaagaataatagttgtatgacaagtaaataagctttgctgggaagatgttgcttaaatgataaaatggttcagccaacaagtgaaccaaaaattaaatattaactaaggaaaggtaaccatttctgaagtcattcctagcagaggactcagatatatataggattgaagatctctcagttaagtctacatgaaaaggatggtttcttggagcttccacaaacttaaaaccatgaaacatctattattgctactattgtgtgtttttctagttaagtcccaaggtgtcaacgacaatgaggaggtgaattttttaaagcattattatattattagtagtattattaatataagatgtaacataatcatattatgtgcttattttaatgaaattagcattgcttatagttatgaaatggaattgttaacctctgacttattgtatttaaagaatgtttcatagtatttcttatataaaaacaaagtaatttcttgttttctagtttatcacctttgttttcttaagatgaggatggcttagctaatgtaagatgtgtttttctcacttgctattctgagtactgtgattttcatttacttctagcaatacaggattacaattaagaggacaagatctgaaaatctcacaaactataaaataataaaagagcagaattttaagataaaagaaactggtggtaggtagattgttctttggtgaaggaaggtaatatatattgttactgagattactatttataaaaattataactaagcctaaaagcaaaatacatcaagtgtaatgatagaaaatgaaatattgcttttttcagatgaaaagttcaaattagagttagtgtgtattgttattattaatagttatgaaacacggttcagtctaatttatttatttgtagaacagtttgtcctcaactattatttttgctgacttattgctgttaatttgcagttactaaaaatacagaaatgcatttaggacaatggatatttaagaaatttaaattttatcatcaaacgtatcatggccaaatttcttacatatagcatagtatcattaaactagaaataagaatacacaataatatttaaatgaagtgattcatttcggatcattattgagtttcaagggaacttgagtgttgtacttatcagactctacatgtaagaacatatagttaatctggttgtgtgtgtaaaaacatatggttaatctggttaagtctggttaatcatattaggtaagaaaaatgtaaagaatgtgtaagacgaaatttttgtaaagtactctgcaaagcactttcacatttctgcttatcaactaaacctcacagagatagtttaatagtttaggctttaaaatggattttgattattcaacaagtggccttcataatttctttaagtgtttttctttaagtatatactttctttaaatattttttaaaatttccttttctctagtaaagccagaccatccatgctacctctctagtggcactctgaaataaaaagaaaatagttttctctgttataattgtatttgtaataagcagatgaatcacatttcttaaaatttgttttagagagggtaagctctgactaggaccatgacttcaatgtgaaatatgtatatatcctccgaatctttacatattaagaatgtatatagtcaactggttaaacaggaaaatctggaacagcctggctgggttttaatcttagcaccatcctactaaatgttaaataatattataatctaatgaataaatgacaatgcaattccaaatagagttcatctgatgacttctagactcacaaaattgcaagagagctcagttgttgctcagttgttccaaatcatgtcgtttgttaatttgtaattaagctccaaaggatgtatagctactgacaaaaaaaaaaatgagaatgtagttaatccaaatcaaaactttcctattgcaatgcgtattttctgcttcattatcctttaatataatattttaagttagcaagtaattttaattacaatgcacaagccttgagaattattttaaatataagaaaatcataatgtttgataaagaaatcatgtaagaaatttcaagataatggtttaacaaataattttgttgatagaagataagactaaaagtgaaattcgaagtggagaggacacttaaactgtagtacttgttatgtgtgattccagtaaaaatagtaatgagcacttattattgccaagtactgttctgagggtaccatatgcaataagttatttaatccttacaataatcttgtaaggcagattcaaactatcattacacttattttacagatgagaaaactggggcacagataaagcaacttgcccaaggtctcatagctgtaagtcaaccctacggtcaagacctacaagtagccgagctccagagtacattatgagggtcaaagattgtcttattacaaataaattccaagtagaatcaacctttaataagtctttaatgtctcttaaatatgtttatataggagtctaatcaccaattcacaaaaatgaaagtagggaaatgattaacaataatcataggaatctaacaatccaagtggcttgagaatattcattcttcttgacagtatagattctttacaatttcgtaagttccaatgtatgttttaggaatatgaggtcattactattcataatctgatacagctttatcctaaggcctctctttaaaaactacactgcatcatagcttttttgtgcagttggtctttctactgttactgaacagtaagcaacctacagattcactatcaccaaccagccagttgatggatcttaagcaaattatcaagcttgtgataacctaaattataaaatgagggtgttggaatagttacattccaaatcttctataacactctgtattatatttctgcctcattccttgtagggtttcttcagtgcccgtggtcatcgaccccttgacaagaagagagaagaggctcccagcctgaggcctgccccaccgcccatcagtggaggtggctatcgggctcgtccagccaaagcagctgccactcaaaagaaagtagaaagaaaagcccctgatgctggaggctgtcttcacgctgacccagacctggtgggtgcactgatgtttcttgcagtggtggctctctcatgcagagaaagcctgtagtcatggcagtctgctaatgtttcactgacccacattaccatcactgttattttgtttgtttattttggaaataaaattcaaaacataaacatattgggcctttggtttaggctttctttcttgttttctttggtctgggcccaaaatttcaaattaggatatgtgggtgccacctttccatttgtattttgccactgcctttgtttagttggtaaaattttcatagcccaattatattttttctggggtaagtaatattttaaatctctatgagagtatgatgatgactttcgaatttctggtcttacagaaaaccaaataataaatttttatgttggctaatcgtatcgctgaattttcctatgtgctattttaacaaatgtccatgacccaaatccttcatctaatgcctgctattttctttgtttttagggggtgttgtgtcctacaggatgtcagttgcaagaggctttgctacaacaggaaaggccaatcagaaatagtgttgatgagttaaataacaatgtggaagctgtttcccagacctcctcttcttcctttcagtacatgtatttgctgaaagacctgtggcaaaagaggcagaagcaagtaaaaggtagatatccttgtgctttccattcgattttcagctataaaattggaaccgttagactgccacgagaatgcatggttgtgagaagattaacatttctgggttagtgaatagcattcatacgcttttgggcaccttcccctgcaacttgccagataagcactattcagctcttattcccagtctgacatcagcaagtgtgattttctatgaaaaattctactatgactccttattttaagtatacaagaaacttgtgactcagaagataatatttacagagtggaaaaaaacccctagcatttatagttttaacatttgaggttttgaatgagagagttatccataatatattcaattgtgttgtggataatgacacctaacctgtgaatcttgaggtcagaatgttgagtgctgttgacttggtggtcaggaaacagctagtgcgtgagcctggcacaggcatctcagtgagtagcatacccacagttggaaatttttcaaagaaatcaaaggaatcatgacatcttataaatttcaaggttctgctatacttatgtgaaatggataaataaatcaagcatatccactctgtaagattgaacttctcagatggaagaccccaatactgctttctcctcttttccctcaccaaagaaataaacaacctatttcatttattactggacacaatctttagcgtatacctatggtaaattactagtatggtggttaggatttatgttaatttgtatatgtcatgcgccaaatcatttccactaaatatgactatatatcataactgcttggtgatagctcagtgtttaatagtttattctcagaaaatcaaaattgtatagttaaatacattagttttatgaggcaaaaatgctaactatttctacataatttcatttttccagataatgaaaatgtagtcaatgagtactcctcagaactggaaaagcaccaattatatatagatgagactgtgaatagcaatatcccaactaaccttcgtgtgcttcgttcaatcctggaaaacctgagaagcaaaatacaaaagttagaatctgatgtctcagctcaaatggaatattgtcgcaccccatgcactgtcagttgcaatattcctgtggtgtctggcaaaggtaactgattcataaacatatttttagagagttccagaagaactcacacaccaaaaataagagaacaacaacaacaacaaaaatgctaagtggattttcccaacagatcataatgacattacagtacatcataaaaatatccttagccagttgtgttttggactggcctggtgcatttgctggttttgatgagcaggatggggcacaggtagtcccaggggtggctgatgtgtgcatctgcgtactggcttgaacagatggcagaaccacagatagatgtagaagtttctccattttgtgtgttctgggagctcatggatattccaggacacaaaaggtggagaagagctttgttcatcctcttagcagataaacgtcctcaaaactgggttggacttactaaagtaaaatgaaaatctaatatttgttatattattttcaaaggtctataataacacactccttagtaacttatgtaatgttattttaaagaattggtgactaaatacaaagtaattatgtcataaacccctgaacataatgttgtcttacatttgcagaatgtgaggaaattatcaggaaaggaggtgaaacatctgaaatgtatctcattcaacctgacagttctgtcaaaccgtatagagtatactgtgacatgaatacagaaaatggaggtaagctttcgacagttgttgacctgttgatctgtaattatttggataccgtaaaatgccaggaaacaaggccaggtgtggtggctcatacctgtaattccagcaccttgggaggccaaagtgggctgatagcttgagcctaggagtttgaaactagcctgggcaacataatgagaccctaactctacaaaaaaaaaaaaaataccaaaaaaaaaaaaaaaatcagctgtgttggtagtatgtgcctgtagtcccagctatccaggaggctgagatgggagatcacctgagcccacaacctggagtcttgatcatgctactgaactgtagcctgggcaacagaggatagtgagatcctgtctcaaaaaaaaaaattaattaaaaagccaggaaacaagacttagctctaacatctaacatagctgacaaaggagtaatttgatgtggaattcaacctgatatttaaaagttataaaatatctataattcacaatttggggtaagataaagcacttgcagtttccaaagattttacaagtttacctctcatatttatttccttattgtgtctattttagagcaccaaatatatactaaatggaatggacaggggattcagatattattttcaaagtgacattatttgctgttggttaatatatgctctttttgtttctgtcaaccaaaggatggacagtgattcagaaccgtcaagacggtagtgttgactttggcaggaaatgggatccatataaacagggatttggaaatgttgcaaccaacacagatgggaagaattactgtggcctaccaggtaacgaacaggcatgcaaaataaaatcattctatttgaaatgggattttttttaattaaaaaacattcattgttggaagcctgttttaggcagttaagaggagtttcctgacaaaaatgtggaagctaaagataagggaagaaaggcagtttttagtttcccaaaattttatttttggtgagagattttattttgtttttcttttaggtgaatattggcttggaaatgataaaattagccagcttaccaggatgggacccacagaacttttgatagaaatggaggactggaaaggagacaaagtaaaggctcactatggaggattcactgtacagaatgaagccaacaaataccagatctcagtgaacaaatacagaggaacagccggtaatgccctcatggatggagcatctcagctgatgggagaaaacaggaccatgaccattcacaacggcatgttcttcagcacgtatgacagagacaatgacggctggtatgtgtggcactctttgctcctgctttaaaaatcacactaatatcattactcagaatcattaacaatatttttaatagctaccacttcctgggcacttactgtcagccactgtcctaagctctttatgcatcactcgaaagcatttcaactataaggtagacattcttattctcattttacagatgagatttagagagattacgtgatttgtccaatgtcacacaactacccagagataaaactagaatttgagcacagttactttctgaataatgagcatttagataaatacctatatctctatattctaaagtgtgtgtgaaaactttcattttcatttccagggttctctgatactaagggttgtaaaagctattattccagtataaagtaacaaacacagtccctagatggattgccacaaaggcccagttatctctctttcttgctatagggcacaggaggtctttggtgtattagtgtgactctatgtatagcacccaaaggaaagactactgtgcacacgagtgtagcagtcttttatgggtaatctgcaaaacgtaacttgaccaccgtagttctgtttctaataacgccaaacacattttctttcaggttaacatcagatcccagaaaacagtgttctaaagaagacggtggtggatggtggtataatagatgtcatgcagccaatccaaacggcagatactactggggtggacagtacacctgggacatggcaaagcatggcacagatgatggtgtagtatggatgaattggaaggggtcatggtactcaatgaggaagatgagtatgaagatcaggcccttcttcccacagcaatagtccccaatacgtagatttttgctcttctgtatgtgacaacatttttgtacattatgttattggaattttctttcatacattatattcctctaaaactctcaagcagacgtgagtgtgactttttgaaaaaagtataggataaattacattaaaatagcacatgattttcttttgttttcttcatttctcttgctcacccaagaagtaacaaaagtatagttttgacagagttggtgttcataatttcagttctagttgattgcgagaattttcaaataaggaagaggggtcttttatccttgtcgtaggaaaaccatgacggaaaggaaaaactgatgtttaaaagtccacttttaaaactatatttatttatgtaggatctgtcaaagaaaacttccaaaaagatttattaattaaaccagactctgttgcaataagttaatgttttcttgttttgtaatccacacattcaatgagttaggctttgcacttgtaaggaaggagaagcgttcacaacctcaaatagctaataaaccggtcttgaatatttgaagatttaaaatctgactctaggacgggcacggtggctcacgactataatcccaacactttgggaggctgaggcgggcggtcacaaggtcaggagttcaagaccagcctgaccaatatggtgaaaccccatctctactaaaaatacaaaaattagccaggcgtggtggcaggtgcctgtaggtcccagctagcctgtgaggtggagattgcattgagccaagatc

SEQ ID NO: 878 - DNA, 1716 bp, Homo sapiens
tgaagtcattcctagcagaggactcagatatatataggattgaagatctctcagttaagtctacatgaaaaggatggtttcttggagcttccacaaacttaaaaccatgaaacatctattattgctactattgtgtgtttttctagttaagtcccaaggtgtcaacgacaatgaggagggtttcttcagtgcccgtggtcatcgaccccttgacaagaagagagaagaggctcccagcctgaggcctgccccaccgcccatcagtggaggtggctatcgggctcgtccagccaaagcagctgccactcaaaagaaagtagaaagaaaagcccctgatgctggaggctgtcttcacgctgagactgtgaatagcaatatcccaactaaccttcgtgtgcttcgttcaatcctggaaaacctgagaagcaaaatacaaaagttagaatctgatgtctcagctcaaatggaatattgtcgcaccccatgcactgtcagttgcaatattcctgtggtgtctggcaaagaatgtgaggaaattatcaggaaaggaggtgaaacatctgaaatgtatctcattcaacctgacagttctgtcaaaccgtatagagtatactgtgacatgaatacagaaaatggaggatggacagtgattcagaaccgtcaagacggtagtgttgactttggcaggaaatgggatccatataaacagggatttggaaatgttgcaaccaacacagatgggaagaattactgtggcctaccaggtgaatattggcttggaaatgataaaattagccagcttaccaggatgggacccacagaacttttgatagaaatggaggactggaaaggagacaaagtaaaggctcactatggaggattcactgtacagaatgaagccaacaaataccagatctcagtgaacaaatacagaggaacagccggtaatgccctcatggatggagcatctcagctgatgggagaaaacaggaccatgaccattcacaacggcatgttcttcagcacgtatgacagagacaatgacggctggttaacatcagatcccagaaaacagtgttctaaagaagacggtggtggatggtggtataatagatgtcatgcagccaatccaaacggcagatactactggggtggacagtacacctgggacatggcaaagcatggcacagatgatggtgtagtatggatgaattggaaggggtcatggtactcaatgaggaagatgagtatgaagatcaggcccttcttcccacagcaatagtccccaatacgtagatttttgctcttctgtatgtgacaacatttttgtacattatgttattggaattttctttcatacattatattcctctaaaactctcaagcagacgtgagtgtgactttttgaaaaaagtataggataaattacattaaaatagcacatgattttcttttgttttcttcatttctcttgctcaccaagaagtaacaaaagtatagttttgacagagttggtgttcataatttcagttctagttgattgcgagaattttcaaataaggaagaggggtcttttatccttgtcgtaggaaaaccatgacggaaaggaaaaactgatgtttaaaagtccacttttaaaactatatttatttatgtaggatctgtcaaagaaaacttccaaaaagatttattaattaaaccagactctgttgcaat

SEQ ID NO: 879 - DNA, 2543 bp, Homo sapiens
tgaagtcattcctagcagaggactcagatatatataggattgaagatctctcagttaagtctacatgaaaaggatggtttcttggagcttccacaaacttaaaaccatgaaacatctattattgctactattgtgtgtttttctagttaagtcccaaggtgtcaacgacaatgaggagggtttcttcagtgcccgtggtcatcgaccccttgacaagaagagagaagaggctcccagcctgaggcctgccccaccgcccatcagtggaggtggctatcgggctcgtccagccaaagcagctgccactcaaaagaaagtagaaagaaaagcccctgatgctggaggctgtcttcacgctgacccagacctgggggtgttgtgtcctacaggatgtcagttgcaagaggctttgctacaacaggaaaggccaatcagaaatagtgttgatgagttaaataacaatgtggaagctgtttcccagacctcctcttcttcctttcagtacatgtatttgctgaaagacctgtggcaaaagaggcagaagcaagtaaaagataatgaaaatgtagtcaatgagtactcctcagaactggaaaagcaccaattatatatagatgagactgtgaatagcaatatcccaactaaccttcgtgtgcttcgttcaatcctggaaaacctgagaagcaaaatacaaaagttagaatctgatgtctcagctcaaatggaatattgtcgcaccccatgcactgtcagttgcaatattcctgtggtgtctggcaaagaatgtgaggaaattatcaggaaaggaggtgaaacatctgaaatgtatctcattcaacctgacagttctgtcaaaccgtatagagtatactgtgacatgaatacagaaaatggaggatggacagtgattcagaaccgtcaagacggtagtgttgactttggcaggaaatgggatccatataaacagggatttggaaatgttgcaaccaacacagatgggaagaattactgtggcctaccaggtgaatattggcttggaaatgataaaattagccagcttaccaggatgggacccacagaacttttgatagaaatggaggactggaaaggagacaaagtaaaggctcactatggaggattcactgtacagaatgaagccaacaaataccagatctcagtgaacaaatacagaggaacagccggtaatgccctcatggatggagcatctcagctgatgggagaaaacaggaccatgaccattcacaacggcatgttcttcagcacgtatgacagagacaatgacggctggttaacatcagatcccagaaaacagtgttctaaagaagacggtggtggatggtggtataatagatgtcatgcagccaatccaaacggcagatactactggggtggacagtacacctgggacatggcaaagcatggcacagatgatggtgtagtatggatgaattggaaggggtcatggtactcaatgaggaagatgaatttttgctcttctgtatgtgacaacatttttgtacattatgttattggaattttctttcatacattatattcctctaaaactctcaagcagacgtgagtgtgactttttgaaaaaagtataggataaattacattaaaatagcacatgattttcttttgttttcttcatttctcttgctcaccaagaagtaacaaaagtatagttttgacagagttggtgttcataatttcagttctagttgattgcgagaattttcaaataaggaagaggggtcttttatccttgtcgtaggaaaaccatgacggaaaggaaaaactgatgtttaaaagtccacttttaaaactatatttatttatgtaggatctgtcaaagaaaacttccaaaaagatttattaattaaaccagactctgttgcaataagttaatgttttcttgttttgtaatccacacattcaatgagttaggctttgcacttgtaaggaaggagaagcgttcacaacctcaaatagctaataaaccggtcttgaatatttgaagatttaaaatctgactctaggacgggcacggtggctcacgactataatcccaacactttgggaggccgaggcgggcggtcacaaggtcaggagttcaagaccagcctgaccaatatggtgaaaccccatctctactaaaaatacaaaaattagccaggcgtggtggcaggtgcctgtagtcccagctacctgtgaggtggagattgcattgagccaagatctcaacactgcactccagcctgggcaacagcgtgagactccacctcaaaaaaaaaaaaaaaagaatctgactatataccatggaaaagccaccactctgccacttaaataaacatcaggatcagagattccaagaggacaatctgcatcaagtcttcaccaagtgttttttaagcgaaataatgaaatagggagcagaatatgcctgttgcccatagaaacgaggtctattcttgtcctcaattaggcttttttttcttcatagttacaccagaactaaa

SEQ ID NO: 880 - DNA, 3693 bp, Homo sapiens
tgaagtcattcctagcagaggactcagatatatataggattgaagatctctcagttaagtctacatgaaaaggatggtttcttggagcttccacaaacttaaaaccatgaaacatctattattgctactattgtgtgtttttctagttaagtcccaaggtgtcaacgacaatgaggagggtttcttcagtgcccgtggtcatcgaccccttgacaagaagagagaagaggctcccagcctgaggcctgccccaccgcccatcagtggaggtggctatcgggctcgtccagccaaagcagctgccactcaaaagaaagtagaaagaaaagcccctgatgctggaggctgtcttcacgctgacccagacctgggggtgttgtgtcctacaggatgtcagttgcaagaggctttgctacaacaggaaaggccaatcagaaatagtgttgatgagttaaataacaatgtggaagctgtttcccagacctcctcttcttcctttcagtacatgtatttgctgaaagacctgtggcaaaagaggcagaagcaagtaaaagataatgaaaatgtagtcaatgagtactcctcagaactggaaaagcaccaattatatatagatgagactgtgaatagcaatatcccaactaaccttcgtgtgcttcgttcaatcctggaaaacctgagaagcaaaatacaaaagttagaatctgatgtctcagctcaaatggaatattgtcgcaccccatgcactgtcagttgcaatattcctgtggtgtctggcaaagaatgtgaggaaattatcaggaaaggaggtgaaacatctgaaatgtatctcattcaacctgacagttctgtcaaaccgtatagagtatactgtgacatgaatacagaaaatggaggatggacagtgattcagaaccgtcaagacggtagtgttgactttggcaggaaatgggatccatataaacagggatttggaaatgttgcaaccaacacagatgggaagaattactgtggcctaccaggtgaatattggcttggaaatgataaaattagccagcttaccaggatgggacccacagaacttttgatagaaatggaggactggaaaggagacaaagtaaaggctcactatggaggattcactgtacagaatgaagccaacaaataccagatctcagtgaacaaatacagaggaacagccggtaatgccctcatggatggagcatctcagctgatgggagaaaacaggaccatgaccattcacaacggcatgttcttcagcacgtatgacagagacaatgacggctggttaacatcagatcccagaaaacagtgttctaaagaagacggtggtggatggtggtataatagatgtcatgcagccaatccaaacggcagatactactggggtggacagtacacctgggacatggcaaagcatggcacagatgatggtgtagtatggatgaattggaaggggtcatggtactcaatgaggaagatgagtatgaagatcaggcccttcttcccacagcaatagtccccaatacgtagatttttgctcttctgtatgtgacaacatttttgtacattatgttattggaattttctttcatacattatattcctctaaaactctcaagcagacgtgagtgtgactttttgaaaaaagtataggataaattacattaaaatagcacatgattttcttttgttttcttcatttctcttgctcaccaagaagtaacaaaagtatagttttgacagagttggtgttcataatttcagttctagttgattgcgagaattttcaaataaggaagaggggtcttttatccttgtcgtaggaaaaccatgacggaaaggaaaaactgatgtttaaaagtccacttttaaaactatatttatttatgtaggatctgtcaaagaaaacttccaaaaagatttattaattaaaccagactctgttgcaataagttaatgttttcttgttttgtaatccacacattcaatgagttaggctttgcacttgtaaggaaggagaagcgttcacaacctcaaatagctaataaaccggtcttgaatatttgaagatttaaaatctgactctaggacgggcacggtggctcacgactataatcccaacactttgggaggccgaggcgggcggtcacaaggtcaggagttcaagaccagcctgaccaatatggtgaaaccccatctctactaaaaatacaaaaattagccaggcgtggtggcaggtgcctgtagtcccagctacctgtgaggtggagattgcattgagccaagatctcaacactgcactccagcctgggcaacagcgtgagactccacctcaaaaaaaaaaaaaaaagaatctgactatataccatggaaaagccaccactctgccacttaaataaacatcaggatcagagattccaagaggacaatctgcatcaagtcttcaccaagtgttttttaagcgaaataatgaaatagggagcagaatatgcctgttgcccatagaaacgaggtctattcttgtcctcaattaggcttttttttcttcatagttacaccagaactaaagtaaaagtggtttttctgttctttctacttctccccatgaaatgggcatatcatctcaacacttcactccaagtcgccacgggcaaccttatgaccctaggtcctccacccctaatgtatcatcattgccacccatttttatggtacttattgttcttaagcttatcctcttaatcttttcatgtaagcaaagctcattaatttctgtcttggaaatgctactactctctttaattactcaccaaatccaactttaacttttgacctggtttctctgccacaagttctgtcccactggagcccatactcacctaccgctttgccatcacatttaacagaaaactcttatcaacttacttcctgcttaacattagctccttcctatctatatccaaatttcttaaattcaaattttttagctggagtaaaaatggtcccagtaccatttcctgttcccttcactataacctacatttttgtcacattaagtttttccccattccaggacaggtcaggccctttaaaaatttcaacagctttattgagatataattgatataatttaaaaaatcctgcacatgtgtcatgctggagccctattgattccaacagggatggcgccttgtccaagaagagacccagagccagtgaatgggacatagggtttatttaggacttaaatacagatgtggtccagtggcagtgggctggacaggaccgctactatttgtaaagagtatgtagtttatataacatttctacttagcactctccacttagcaacctccatttaacccaaaataaaaggccttggttccttgcacatcctgagttccaacggacaggcagggagttcaagtgtccttcacagataagaagtgaatctctctgggttggccattcccggattccttagcttagactctgaacacatattcttcttagaccatacagtcattctcagggtatgcttgagttaatgctgtcggatgcatctgtcatacaaagtgtttaacatatacgatttcatgattttggaaatatgcatacacccatgatatcactggcacagtcaagatattaaatatatccatcacctcc

SEQ ID NO: 881 - DNA, 1864 bp, Homo sapiens
agtctacatgaaaaggatggtttcttggagcttccacaaacttaaaaccatgaaacatctattattgctactattgtgtgtttttctagttaagtcccaaggtgtcaacgacaatgaggagggtttcttcagtgcccgtggtcatcgaccccttgacaagaagagagaagaggctcccagcctgaggcctgccccaccgcccatcagtggaggtggctatcgggctcgtccagccaaagcagctgccactcaaaagaaagtagaaattgtgtcctacaggatgtcagttgcaagaggctttgctacaacaggaaaggccaatcagaaatagtgttgatgagttaaataacaatgtggaagctgtttcccagacctcctcttcttcctttcagtacatgtatttgctgaaagacctgtggcaaaagaggcagaagcaagtaaaagataatgaaaatgtagtcaatgagtactcctcagaactggaaaagcaccaattatatatagatgagactgtgaatagcaatatcccaactaaccttcgtgtgcttcgttcaatcctggaaaacctgagaagcaaaatacaaaagttagaatctgatgtctcagctcaaatggaatattgtcgcaccccatgcactgtcagttgcaatattcctgtggtgtctggcaaagaatgtgaggaaattatcaggaaaggaggtgaaacatctgaaatgtatctcattcaacctgacagttctgtcaaaccgtatagagtatactgtgacatgaatacagaaaatggaggatggacagtgattcagaaccgtcaagacggtagtgttgactttggcaggaaatgggatccatataaacagggatttggaaatgttgcaaccaacacagatgggaagaattactgtggcctaccaggtgaatattggcttggaaatgataaaattagccagcttaccaggatgggacccacagaacttttgatagaaatggaggactggaaaggagacaaagtaaaggctcactatggaggattcactgtacagaatgaagccaacaaataccagatctcagtgaacaaatacagaggaacagccggtaatgccctcatggatggagcatctcagctgatgggagaaaacaggaccatgaccattcacaacggcatgttcttcagcacgtatgacagagacaatgacggctggttaacatcagatcccagaaaacagtgttctaaagaagacggtggtggatggtggtataatagatgtcatgcagccaatccaaacggcagatactactggggtggacagtacacctgggacatggcaaagcatggcacagatgatggtgtagtatggatgaattggaaggggtcatggtactcaatgaggaagatgagtatgaagatcaggcccttcttcccacagcaatagtccccaatacgtagatttttgctcttctgtatgtgacaacatttttgtacattatgttattggaattttctttcatacattatattcctctaaaactctcaagcagacgtgagtgtgactttttgaaaaaagtataggataaattacattaaaatagcacatgattttcttttgttttcttcatttctcttgctcaccaagaagtaacaaaagtatagttttgacagagttggtgttcataatttcagttctagttgattgcgagaattttcaaataaggaagaggggtcttttatccttgtcgtaggaaaaccatgacggaaaggaaaaactgatgtttaaaagtccacttttaaaactatatttatttatgtaggatctgtcaaagaaaacttccaaaaagatttattaattaaaccagactctgttgcaat

SEQ ID NO: 882 - DNA, 1882 bp, Homo sapiens
tgaagtcattcctagcagaggactcagatatatataggattgaagatctctcagttaagtctacatgaaaaggatggtttcttggagcttccacaaacttaaaaccatgaaacatctattattgctactattgtgtgtttttctagttaagtcccaaggtgtcaacgacaatgaggagggtttcttcagtgcccgtggtcatcgaccccttgacaagaagagagaagaggctcccacccctgatgctggaggctgtcttcacgctgacccagacctgggggtgttgtgtcctacaggatgtcagttgcaagaggctttgctacaacaggaaaggccaatcagaaatagtgttgatgagttaaataacaatgtggaagctgtttcccagacctcctcttcttcctttcagtacatgtatttgctgaaagacctgtggcaaaagaggcagaagcaagtaaaagataatgaaaatgtagtcaatgagtactcctcagaactggaaaagcaccaattatatatagatgagactgtgaatagcaatatcccaactaaccttcgtgtgcttcgttcaatcctggaaaacctgagaagcaaaatacaaaagttagaatctgatgtctcagctcaaatggaatattgtcgcaccccatgcactgtcagttgcaatattcctgtggtgtctggcaaagaatgtgaggaaattatcaggaaaggaggtgaaacatctgaaatgtatctcattcaacctgacagttctgtcaaaccgtatagagtatactgtgacatgaatacagaaaatggagggatggacagtgattcagaaccgtcaagacggtagtgttgactttggcaggaaatgggatccatataaacagggatttggaaatgttgcaaccaacacagatgggaagaattactgtggcctaccaggtgaatattggcttggaaatgataaaattagccagcttaccaggatgggacccacagaacttttgatagaaatggaggactggaaaggagacaaagtaaaggctcactatggaggattcactgtacagaatgaagccaacaaataccagatctcagtgaacaaatacagaggaacagccggtaatgccctcatggatggagcatctcagctgatgggagaaaacaggaccatgaccattcacaacggcatgttcttcagcacgtatgacagagacaatgacggctggttaacatcagatcccagaaaacagtgttctaaagaagacggtggtggatggtggtataatagatgtcatgcagccaatccaaacggcagatactactggggtggacagtacacctgggacatggcaaagcatggcacagatgatggtgtagtatggatgaattggaaggggtcatggtactcaatgaggaagatgagtatgaagatcaggcccttcttcccacagcaatagtccccaatacgtagatttttgctcttctgtatgtgacaacatttttgtacattatgttattggaattttctttcatacattatattcctctaaaactctcaagcagacgtgagtgtgactttttgaaaaaagtataggataaattacattaaaatagcacatgattttcttttgttttcttcatttctcttgctcaccaagaagtaacaaaagtatagttttgacagagttggtgttcataatttcagttctagttgattgcgagaattttcaaataaggaagaggggtcttttatccttgtcgtaggaaaaccatgacggaaaggaaaaactgatgtttaaaagtccacttttaaaactatatttatttatgtaggatctgtcaaagaaaacttccaaaaagatttattaattaaaccagactctgttgcaat

SEQ ID NO: 883 - DNA, 1907 bp, Homo sapiens
agtaagcaacctacagattcactatcaccaaccagccagttgatggatcttaagcaaattatcaagcttgtgataacctaaattataaaatgagggtgttggaatagttacattccaaatcttctataacactctgtattatatttctgcctcattccttgtagggtttcttcagtgcccgtggtcatcgaccccttgacaagaagagagaagaggctcccagcctgaggcctgccccaccgcccatcagtggaggtggctatcgggctcgtccagccaaagcagctgccactcaaaagaaagtagaaattgtgtcctacaggatgtcagttgcaagaggctttgctacaacaggaaaggccaatcagaaatagtgttgatgagttaaataacaatgtggaagctgtttcccagacctcctcttcttcctttcagtacatgtatttgctgaaagacctgtggcaaaagaggcagaagcaagtaaaagataatgaaaatgtagtcaatgagtactcctcagaactggaaaagcaccaattatatatagatgagactgtgaatagcaatatcccaactaaccttcgtgtgcttcgttcaatcctggaaaacctgagaagcaaaatacaaaagttagaatctgatgtctcagctcaaatggaatattgtcgcaccccatgcactgtcagttgcaatattcctgtggtgtctggcaaagaatgtgaggaaattatcaggaaaggaggtgaaacatctgaaatgtatctcattcaacctgacagttctgtcaaaccgtatagagtatactgtgacatgaatacagaaaatggaggatggacagtgattcagaaccgtcaagacggtagtgttgactttggcaggaaatgggatccatataaacagggatttggaaatgttgcaaccaacacagatgggaagaattactgtggcctaccaggtgaatattggcttggaaatgataaaattagccagcttaccaggatgggacccacagaacttttgatagaaatggaggactggaaaggagacaaagtaaaggctcactatggaggattcactgtacagaatgaagccaacaaataccagatctcagtgaacaaatacagaggaacagccggtaatgccctcatggatggagcatctcagctgatgggagaaaacaggaccatgaccattcacaacggcatgttcttcagcacgtatgacagagacaatgacggctggttaacatcagatcccagaaaacagtgttctaaagaagacggtggtggatggtggtataatagatgtcatgcagccaatccaaacggcagatactactggggtggacagtacacctgggacatggcaaagcatggcacagatgatggtgtagtatggatgaattggaaggggtcatggtactcaatgaggaagatgagtatgaagatcaggcccttcttcccacagcaatagtccccaatacgtagatttttgctcttctgtatgtgacaacatttttgtacattatgttattggaattttctttcatacattatattcctctaaaactctcaagcagacgtgagtgtgactttttgaaaaaagtataggataaattacattaaaatagcacatgattttcttttgttttcttcatttctcttgctcaccaagaagtaacaaaagtatagttttgacagagttggtgttcataatttcagttctagttgattgcgagaattttcaaataaggaagaggggtcttttatccttgtcgtaggaaaaccatgacggaaaggaaaaactgatgtttaaaagtccacttttaaaactatatttatttatgtaggatctgtcaaagaaaacttccaaaaagatttattaattaaaccagactctgttgcaat

SEQ ID NO: 884 - DNA, 1797 bp, Homo sapiens
tgaagtcattcctagcagaggactcagatatatataggattgaagatctctcagttaagtctacatgaaaaggatggtttcttggagcttccacaaacttaaaaccatgaaacatctattattgctactattgtgtgtttttctagttaagtcccaaggtgtcaacgacaatgaggagggtttcttcagtgcccgtggtcatcgaccccttgacaagaagagagaagaggctttgctacaacaggaaaggccaatcagaaatagtgttgatgagttaaataacaatgtggaagctgtttcccagacctcctcttcttcctttcagtacatgtatttgctgaaagacctgtggcaaaagaggcagaagcaagtaaaagataatgaaaatgtagtcaatgagtactcctcagaactggaaaagcaccaattatatatagatgagactgtgaatagcaatatcccaactaaccttcgtgtgcttcgttcaatcctggaaaacctgagaagcaaaatacaaaagttagaatctgatgtctcagctcaaatggaatattgtcgcaccccatgcactgtcagttgcaatattcctgtggtgtctggcaaagaatgtgaggaaattatcaggaaaggaggtgaaacatctgaaatgtatctcattcaacctgacagttctgtcaaaccgtatagagtatactgtgacatgaatacagaaaatggaggatggacagtgattcagaaccgtcaagacggtagtgttgactttggcaggaaatgggatccatataaacagggatttggaaatgttgcaaccaacacagatgggaagaattactgtggcctaccaggtgaatattggcttggaaatgataaaattagccagcttaccaggatgggacccacagaacttttgatagaaatggaggactggaaaggagacaaagtaaaggctcactatggaggattcactgtacagaatgaagccaacaaataccagatctcagtgaacaaatacagaggaacagccggtaatgccctcatggatggagcatctcagctgatgggagaaaacaggaccatgaccattcacaacggcatgttcttcagcacgtatgacagagacaatgacggctggttaacatcagatcccagaaaacagtgttctaaagaagacggtggtggatggtggtataatagatgtcatgcagccaatccaaacggcagatactactggggtggacagtacacctgggacatggcaaagcatggcacagatgatggtgtagtatggatgaattggaaggggtcatggtactcaatgaggaagatgagtatgaagatcaggcccttcttcccacagcaatagtccccaatacgtagatttttgctcttctgtatgtgacaacatttttgtacattatgttattggaattttctttcatacattatattcctctaaaactctcaagcagacgtgagtgtgactttttgaaaaaagtataggataaattacattaaaatagcacatgattttcttttgttttcttcatttctcttgctcaccaagaagtaacaaaagtatagttttgacagagttggtgttcataatttcagttctagttgattgcgagaattttcaaataaggaagaggggtcttttatccttgtcgtaggaaaaccatgacggaaaggaaaaactgatgtttaaaagtccacttttaaaactatatttatttatgtaggatctgtcaaagaaaacttccaaaaagatttattaattaaaccagactctgttgcaat

SEQ ID NO: 885 - DNA, 1918 bp, Homo sapiens
aagtctacatgaaaaggatggtttcttggagcttccacaaacttaaaaccatgaaacatctattattgctactattgtgtgtttttctagttaagtcccaaggtgtcaacgacaatgaggagggtttcttcagtgcccgtggtcatcgaccccttgacaagaagagagaagaggctcccagcctgaggcctgccccaccgcccatcagtggaggtggctatcgggctcgtccagccaaagcagctgccactcaaaagaaagtagaaagaaaagcccctgatgctggaggctgtcttcacgctgacccagacctgggggtgttgtgtcctacaggatgtcagttgcaagaggctttgctacaacaggaaaggccaatcagaaatagtgttgatgagttaaataacaatgtggaagctgtttcccagacctcctcttcttcctttcagtacatgtatttgctgaaagacctgtggcaaaagaggcagaagcaagtaaaagataatgaaaatgtagtcaatgagtactcctcagaactggaaaagcaccaattatatatagatgagactgtgaatagcaatatcgcaactaaccttcgtgtgcttcgttcaatcctagaaaacctgagaagcaaaatacaaaagttagaatctgatgtctcagctcaaatggaatattgtcgcaccccatgcactgtcagttgcaatattcctgtggtgtctggcaaagaatgtgaggaaattatcaggaaaggaggtgaaacatctgaaatgtatctcattcaacctgacagttctgtcaaaccgtatagagtatactgtgacatgaatacagaaaatggaggatggacagtgattcagaaccgtcaagacggtagtgttgactttggcaggaaatgggatccatataaacagggatttggaaatgttgcaaccaacacagatgggaagaattactgtggcctaccaggtgaatattggcttggaaatgataaaattagccagcttaccaggatgggacccacagaacttttgatagaaatggaggactggaaaggagacaaagtaaaggctcactatggaggattcactgtacagaatgaagccaacaaataccagatctcagtgaacaaatacagaggaacagccggtaatgccctcatggatggagcatctcagctgatgggagaaaacaggaccatgaccattcacaacggcatgttcttcagcacgtatgacagagacaatgacggctggttaacatcagatcccagaaaacagtgttctaaagaagacggtggtggatggtggtataatagatgtcatgcagccaatccaaacggcagatactactggggtggacagtacacctgggacatggcaaagcatggcacagatgatggtgtagtatggatgaattggaaggggtcatggtactcaatgaggaagatgagtatgaagatcaggcccttcttcccacagcaatagtccccaatacgtagatttttgctcttctgtatgtgacaacatttttgtacattatgttattggaattttctttcatacattatattcctctaaaactctcaagcagacgtgagtgtgactttttgaaaaaagtataggataaattacattaaaatagcacatgattttcttttgttttcttcatttctcttgctcaccaagaagtaacaaaagtatagttttgacagagttggtgttcataatttcagttctagttgattgcgagaattttcaaataaggaagaggggtcttttatccttgtcgtaggaaaaccatgacggaaaggaaaaactgatgtttaaaagtccacttttaaaactatatttatttatgtaggatctgtcaaagaaaacttccaaaaagatttattaattaaaccagactctgttgcaat

SEQ ID NO: 886 - DNA, 1485 bp, Homo sapiens
tgaagtcattcctagcagaggactcagatatatataggattgaagatctctcagttaagtctacatgaaaaggatggtttcttggagcttccacaaacttaaaaccatgaaacatctattattgctactattgtgtgtttttctagttaagtcccaaggtgtcaacgacaatgaggagggtttcttcagtgcccgtggtcatcgaccccttgacaagaagagagaagaggctcccagcctgaggcctgccccaccgcccatcagtggaggtggctatcgggctcgtccagccaaagcagctgccactcaaaagaaagtagaaagaaaagcccctgatgctggaggctgtcttcacgctgacccagacctgggggtgttgtgtcctacaggatgtcagttgcaagaggctttgctacaacaggaaaggccaatcagaaatagtgttgatgagttaaataacaatgtggaagctgtttcccagacctcctcttcttcctttcagtacatgtatttgctgaaagacctgtggcaaaagaggcagaagcaagtaaaagataatgaaaatgtagtcaatgagtactcctcagaactggaaaagcaccaattatatatagatgagactgtgaatagcaatatcccaactaaccttcgtgtgcttcgttcaatcctggaaaacctgagaagcaaaatacaaaagttagaatctgatgtctcagctcaaatggaatattgtcgcaccccatgcactgtcagttgcaatattcctgtggtgtctggcaaagaatgtgaggaaattatcaggaaaggaggtgaaacatctgaaatgtatctcattcaacctgacagttctgtcaaaccgtatagagtatactgtgacatgaatacagaaaatggaggatggacagtgattcagaaccgtcaagacggtagtgttgactttggcaggaaatgggatccatataaacagggatttggaaatgttgcaaccaacacagatgggaagaattactgtggcctaccaggtgaatattggcttggaaatgataaaattagccagcttaccaggatgggacccacagaacttttgatagaaatggaggactggaaaggagacaaagtaaaggctcactatggaggattcactgtacagaatgaagccaacaaataccagatctcagtgaacaaatacagaggaacagccggtaatgccctcatggatggagcatctcagctgatgggagaaaacaggaccatgaccattcacaacggcatgttcttcagcacgtatgacagagacaatgacggctggttaacatcagatcccagaaaacaccaatccaaacggcagatactactggggtggacagtacacctgggacatggcaaagcatggcacagatgatggtgtagtatggatgaattggaaggggtcatggtactcaatgaggaagatgagtatgaagatcaggcccttcttcccacagc

SEQ ID NO: 887 - DNA, 1839 bp, Homo sapiens
ggtttcttggagcttccacaaacttaaaaccatgaaacatctattattgctactattgtgtgtttttctagttaagtcccaaggtgtcaacgacaatgaggagggtttcttcagtgcccgtggtcatcgaccccttgacaagaagagagaagaggctcccagcctgaggcctgccccaccgcccatcagtggaggtggctatcgggctcgtccagccaaagcagctgccactcaaaagaaattgtgtcctacaggatgtcagttgcaagaggctttgctacaacaggaaaggccaatcagaaatagtgttgatgagttaaataacaatgtggaagctgtttcccagacctcctcttcttcctttcagtacatgtatttgctgaaagacctgtggcaaaagaggcagaagcaagtaaaagataatgaaaatgtagtcaatgagtactcctcagaactggaaaagcaccaattatatatagatgagactgtgaatagcaatatcccaactaaccttcgtgtgcttcgttcaatcctggaaaacctgagaagcaaaatacaaaagttagaatctgatgtctcagctcaaatggaatattgtcgcaccccatgcactgtcagttgcaatattcctgtggtgtctggcaaagaatgtgaggaaattatcaggaaaggaggtgaaacatctgaaatgtatctcattcaacctgacagttctgtcaaaccgtatagagtatactgtgacatgaatacagaaaatggaggatggacagtgattcagaaccgtcaagacggtagtgttgactttggcaggaaatgggatccatataaacagggatttggaaatgttgcaaccaacacagatgggaagaattactgtggcctaccaggtgaatattggcttggaaatgataaaattagccagcttaccaggatgggacccacagaacttttgatagaaatggaggactggaaaggagacaaagtaaaggctcactatggaggattcactgtacagaatgaagccaacaaataccagatctcagtgaacaaatacagaggaacagccggtaatgccctcatggatggagcatctcagctgatgggagaaaacaggaccatgaccattcacaacggcatgttcttcagcacgtatgacagagacaatgacggctggttaacatcagatcccagaaaacagtgttctaaagaagacggtggtggatggtggtataatagatgtcatgcagccaatccaaacggcagatactactggggtggacagtacacctgggacatggcaaagcatggcacagatgatggtgtagtatggatgaattggaaggggtcatggtactcaatgaggaagatgagtatgaagatcaggcccttcttcccacagcaatagtccccaatacgtagatttttgctcttctgtatgtgacaacatttttgtacattatgttattggaattttctttcatacattatattcctctaaaactctcaagcagacgtgagtgtgactttttgaaaaaagtataggataaattacattaaaatagcacatgattttcttttgttttcttcatttctcttgctcaccaagaagtaacaaaagtatagttttgacagagttggtgttcataatttcagttctagttgattgcgagaattttcaaataaggaagaggggtcttttatccttgtcgtaggaaaaccatgacggaaaggaaaaactgatgtttaaaagtccacttttaaaactatatttatttatgtaggatctgtcaaagaaaacttccaaaaagatttattaattaaaccagactctgttgcaat

SEQ ID NO: 888 - DNA, 3163 bp, Homo sapiens
gggaggctggggatggcgcgtggcccctttaagacgcaccggggcgggcccgggcggcgcgcggcccctttaaggcttggcctacgtggcagccgctggagccgcagccgacgcggagcgaggccggccgccgggcacttcctgtggaggccgcagcgggtgcgggcgccgacgggcgagagccagcgagcgagcgagcgagccgagccgagcctcccgccgtcgccatgggccagaacgacctgatgggcacggccgaggacttcgccgaccagcgtctgttcctcacacaccccgcccaaggacgtgcctggcagcggcctggtgctccccgccgcagccacctcacccttgggtttctgtggccctgcagttcctccgtgtcacaaagcagtacctgccccacgtggcgcgcctctgtctgatcagcaccttcctggaggacggcatccgtatgtggttccagtggagcgagcagcgcgactacatcgacaccacctggaactgcggctacctgctggcctcgtccttcgtcttcctcaacttgctgggacagctgactggctgcgtcctggtgttgagcaggaacttcgtgcagtacgcctgcttcgggctctttggaatcatagctctgcagacgattgcctacagcattttatgggacttgaagtttttgatgaggaacctggccctgggaggaggcctgttgctgctcctagcagaatcccgttctgaagggaagagcatgtttgcgggcgtccccaccatgcgtgagagctcccccaaacagtacatgcagctcggaggcagggtcttgctggttctgatgttcatgaccctccttcactttgacgccagcttcttttctattgtccagaacatcgtgggcacagctctgatgattttagtggccattggttttaaaaccaagctggctgctttgactcttgttgtgtggctctttgccatcaacgtatatttcaacgccttctggaccattccagtctacaagcccatgcatgacttcctgaaatacgacttcttccagaccatgtcggtgattgggggcttgctcctggtggtggccctgggccctgggggtgtctccatggatgagaagaagaaggagtggtaacagtcacagatccctacctgcctggctaagacccgtggccgtcaaggactggttcggggtggattcaacaaaactgccagcttttatgtatcctcttcccttcccctcccttggtaaaggcacagatgttttgagaactttatttgcagagacacctgagaatcgatggctcagtctgctctggagccacagtctggcgtctgacccttcagtgcaggccagcctggcagctggaagcctcccccacgccgaggctttggagtgaacagcccgcttggctgtggcatctcagtcctatttttgagtttttttgtgggggtacaggagggggccttcaagctgtactgtgagcagacgcattggtattatcattcaaagcagtctccctcttatttgtaagtttacatttttagcggaaactactaaattattttgggtggttcagccaaacctcaaaacagttaatctccctggtttaaaatcacaccagtggctttgatgttgtttctgccccgcattgtattttataggaatagtgaaaacatttagggacacccaaagaatgatgcagtattaaaggggtggtagaagctgctgtttatgataaaagtcatcggtcagaaaatcagcttggattggtgccaagtgttttattgggtaacaccctgggagttttagtagcttgaggcaaggtggaggggcaagaagtccttggggaagctgctggtctgggtgctgctggcctccaagctggcagtgggaagggctagtgagaccacacaggggtagccccagcagcagcaccctgcaagccagcctggccagctgctcagaccagcttgcagagccgcagccgctgtgggcagggggtgtggcaggagctcccagcactggagacccacggactcaacccagttacctcacatggggccttttctgagcaaggtctcgaaagcgcaggccgccctggctgagcagcaccgccctttcccagctgcactcgccctgtggacagccccgacacaccactttcctgaggctgtcgctcactcagattgtccgtttgctatgccgaatgcagccaaaattcctttttacaatttgtgatgccttaccgatttgatcttaatcctgtatttaaagttttctaacactgccttatactgtgtttctctttttgggggagcttaactgcttgttgctccctgtcgtctgcaccatagtaaatgccacaagggtagtcgaacacctctctggcccctagacctatctggggacaggctggctcagcctgtctccagggctgctgcggcccagccccgagcctgcctccctcttggcctctcatccattggctctgcagggcaggggtgaggcaggtttctgctcataagtgcttttggaagtcacctacctttttaacacagccgaactagtcccaacgcgtttgcaaatattcccctggtagcctacttccttacccccgaatattggtaagatcgagcaatggcttcaggacatgggttctcttctcctgtgatcattcaagtgctcactgcatgaagactggcttgtctcagtgtttcaacctcaccagggctgtctcttggtccacacctcgctccctgttagtgccgtatgacagcccccatcaaatgaccttggccaagtcacggtttctctgtggtcaaggttggttggctgattggtggaaagtagggtggaccaaaggaggccacgtgagcagtcagcaccagttctgcaccagcagcgcctccgtcctagtgggtgttcctgtttctcctggccctgggtgggctagggcctgattcgggaagatgcctttgcagggaggggaggataagtgggatctaccaattgattctggcaaaacaatttctaagatttttttgctttatgtgggaaacagatctaaatctcattttatgctgtattttatatcttagttgtgtttgaaaacgttttgatttttggaaacacatcaaaataaataatggcgtttgttgt

SEQ ID NO: 889 - DNA, 1478 bp, Homo sapiens
ccgagcctcccgccgtcgccatgggccagaacgacctgatgggcacggccgaggacttcgccgaccagttcctccgtgtcacaaagcagtacctgccccacgtggcgcgcctctgtctgatcagcaccttcctggaggacggcatccgtatgtggttccagtggagcgagcagcgcgactacatcgacaccacctggaactgcggctacctgctggcctcgtccttcgtcttcctcaacttgctgggacagctgactggctgcgtcctggtgttgagcaggaacttcgtgcagtacgcctgcttcgggctctttggaatcatagctctgcagacgattgcctacagcattttatgggacttgaagtttttgatgaggaacctggccctgggaggaggcctgttgctgctcctagcagaatcccgttctgaagggaagagcatgtttgcgggcgtccccaccatgcgtgagagctcccccaaacagtacatgcagctcggaggcagggtcttgctggttctgatgttcatgaccctccttcactttgacgccagcttcttttctattgtccagaacatcgtgggcacagctctgatgattttagtggccattggttttaaaaccaagctggctgctttgactcttgttgtgtggctctttgccatcaacgtatatttcaacgccttctggaccattccagtctacaagcccatgcatgacttcctgaaatacgacttcttccagaccatgtcggtgattgggggcttgctcctggtggtggccctgggccctgggggtgtctccatggatgagaagaagaaggagtggtaacagtcacagatccctacctgcctggctaagacccgtggccgtcaaggactggttcggggtggattcaacaaaactgccagcttttatgtatcctcttcccttcccctcccttggtaaaggcacagatgttttgagaactttatttgcagagacacctgagaatcgatggctcagtctgctctggagccacagtctggcgtctgacccttcagtgcaggccagcctggcagctggaagcctcccccacgccgaggctttggagtgaacagcccgcttggctgtggcatctcagtcctatttttgagtttttttgtgggggtacaggagggggccttcaagctgtactgtgagcagacgcattggtattatcattcaaagcagtctccctcttatttgtaagtttacatttttagcggaaactactaaattattttgggtggttcagccaaacctcaaaacagttaatctccctggtttaaaatcacaccagtggctttgatgttgtttctgccccgcattgtattttataggaatagtgaaaacatttagggacacccaaagaatgatgcagtattaaaggggtggtagaagctgctgtttatgataaaagtcatcggtcagaaaatcaaaaaaaaaaaaaaaaaaaaa

SEQ ID NO: 890 - DNA, 3065 bp, Homo sapiens
gggaggctggggatggcgcgtggcccctttaagacgcaccggggcgggcccgggcggcgcgcggcccctttaaggcttggcctacgtggcagccgctggagccgcagccgacgcggagcgaggccggccgccgggcacttcctgtggaggccgcagcgggtgcgggcgccgacgggcgagagccagcgagcgagcgagcgagccgagccgagcctcccgccgtcgccatgggccagaacgacctgatgggcacggccgaggacttcgccgaccagttcctccgtgtcacaaagcagtacctgccccacgtggcgcgcctctgtctgatcagcaccttcctggaggacggcatccgtatgtggttccagtggagcgagcagcgcgactacatcgacaccacctggaactgcggctacctgctggcctcgtccttcgtcttcctcaacttgctgggacagctgactggctgcgtcctggtgttgagcaggaacttcgtgcagtacgcctgcttcgggctctttggaatcatagctctgcagacgattgcctacagcattttatgggacttgaagtttttgatgaggaacctggccctgggaggaggcctgttgctgctcctagcagaatcccgttctgaagggaagagcatgtttgcgggcgtccccaccatgcgtgagagctcccccaaacagtacatgcagctcggaggcagggtcttgctggttctgatgttcatgaccctccttcactttgacgccagcttcttttctattgtccagaacatcgtgggcacagctctgatgattttagtggccattggttttaaaaccaagctggctgctttgactcttgttgtgtggctctttgccatcaacgtatatttcaacgccttctggaccattccagtctacaagcccatgcatgacttcctgaaatacgacttcttccagaccatgtcggtgattgggggcttgctcctggtggtggccctgggccctgggggtgtctccatggatgagaagaagaaggagtggtaacagtcacagatccctacctgcctggctaagacccgtggccgtcaaggactggttcggggtggattcaacaaaactgccagcttttatgtatcctcttcccttcccctcccttggtaaaggcacagatgttttgagaactttatttgcagagacacctgagaatcgatggctcagtctgctctggagccacagtctggcgtctgacccttcagtgcaggccagcctggcagctggaagcctcccccacgccgaggctttggagtgaacagcccgcttggctgtggcatctcagtcctatttttgagtttttttgtgggggtacaggagggggccttcaagctgtactgtgagcagacgcattggtattatcattcaaagcagtctccctcttatttgtaagtttacatttttagcggaaactactaaattattttgggtggttcagccaaacctcaaaacagttaatctccctggtttaaaatcacaccagtggctttgatgttgtttctgccccgcattgtattttataggaatagtgaaaacatttagggacacccaaagaatgatgcagtattaaaggggtggtagaagctgctgtttatgataaaagtcatcggtcagaaaatcagcttggattggtgccaagtgttttattgggtaacaccctgggagttttagtagcttgaggcaaggtggaggggcaagaagtccttggggaagctgctggtctgggtgctgctggcctccaagctggcagtgggaagggctagtgagaccacacaggggtagccccagcagcagcaccctgcaagccagcctggccagctgctcagaccagcttgcagagccgcagccgctgtgggcagggggtgtggcaggagctcccagcactggagacccacggactcaacccagttacctcacatggggccttttctgagcaaggtctcgaaagcgcaggccgccctggctgagcagcaccgccctttcccagctgcactcgccctgtggacagccccgacacaccactttcctgaggctgtcgctcactcagattgtccgtttgctatgccgaatgcagccaaaattcctttttacaatttgtgatgccttaccgatttgatcttaatcctgtatttaaagttttctaacactgccttatactgtgtttctctttttgggggagcttaactgcttgttgctccctgtcgtctgcaccatagtaaatgccacaagggtagtcgaacacctctctggcccctagacctatctggggacaggctggctcagcctgtctccagggctgctgcggcccagccccgagcctgcctccctcttggcctctcatccattggctctgcagggcaggggtgaggcaggtttctgctcataagtgcttttggaagtcacctacctttttaacacagccgaactagtcccaacgcgtttgcaaatattcccctggtagcctacttccttacccccgaatattggtaagatcgagcaatggcttcaggacatgggttctcttctcctgtgatcattcaagtgctcactgcatgaagactggcttgtctcagtgtttcaacctcaccagggctgtctcttggtccacacctcgctccctgttagtgccgtatgacagcccccatcaaatgaccttggccaagtcacggtttctctgtggtcaaggttggttggctgattggtggaaagtagggtggaccaaaggaggccacgtgagcagtcagcaccagttctgcaccagcagcgcctccgtcctagtgggtgttcctgtttctcctggccctgggtgggctagggcctgattcgggaagatgcctttgcagggaggggaggataagtgggatctaccaattgattctggcaaaacaatttctaagatttttttgctttatgtgggaaacagatctaaatctcattttatgctgtattttatatcttagttgtgtttgaaaacgttttgatttttggaaacacatcaaaataaataatggcgtttgttgt

SEQ ID NO: 891 - DNA, 3046 bp, Homo sapiens
gcgtctccctccccgtttggactctgccctgggctggattgagtggggacctgtacacagcctgggaggaggggaagcctatctccctgatagtctccttccagaagtgtccaggtggcattctgagcaacagggaagcctttgaaacaggcggttggcgtctgttcctcacacaccccgcccaaggacgtgcctggcagcggcctggtgctccccgccgcagccacctcacccttgggtttctgtggccctgcagttcctccgtgtcacaaagcagtacctgccccacgtggcgcgcctctgtctgatcagcaccttcctggaggacggcatccgtatgtggttccagtggagcgagcagcgcgactacatcgacaccacctggaactgcggctacctgctggcctcgtccttcgtcttcctcaacttgctgggacagctgactggctgcgtcctggtgttgagcaggaacttcgtgcagtacgcctgcttcgggctctttggaatcatagctctgcagacgattgcctacagcattttatgggacttgaagtttttgatgaggaacctggccctgggaggaggcctgttgctgctcctagcagaatcccgttctgaagggaagagcatgtttgcgggcgtccccaccatgcgtgagagctcccccaaacagtacatgcagctcggaggcagggtcttgctggttctgatgttcatgaccctccttcactttgacgccagcttcttttctattgtccagaacatcgtgggcacagctctgatgattttagtggccattggttttaaaaccaagctggctgctttgactcttgttgtgtggctctttgccatcaacgtatatttcaacgccttctggaccattccagtctacaagcccatgcatgacttcctgaaatacgacttcttccagaccatgtcggtgattgggggcttgctcctggtggtggccctgggccctgggggtgtctccatggatgagaagaagaaggagtggtaacagtcacagatccctacctgcctggctaagacccgtggccgtcaaggactggttcggggtggattcaacaaaactgccagcttttatgtatcctcttcccttcccctcccttggtaaaggcacagatgttttgagaactttatttgcagagacacctgagaatcgatggctcagtctgctctggagccacagtctggcgtctgacccttcagtgcaggccagcctggcagctggaagcctcccccacgccgaggctttggagtgaacagcccgcttggctgtggcatctcagtcctatttttgagtttttttgtgggggtacaggagggggccttcaagctgtactgtgagcagacgcattggtattatcattcaaagcagtctccctcttatttgtaagtttacatttttagcggaaactactaaattattttgggtggttcagccaaacctcaaaacagttaatctccctggtttaaaatcacaccagtggctttgatgttgtttctgccccgcattgtattttataggaatagtgaaaacatttagggacacccaaagaatgatgcagtattaaaggggtggtagaagctgctgtttatgataaaagtcatcggtcagaaaatcagcttggattggtgccaagtgttttattgggtaacaccctgggagttttagtagcttgaggcaaggtggaggggcaagaagtccttggggaagctgctggtctgggtgctgctggcctccaagctggcagtgggaagggctagtgagaccacacaggggtagccccagcagcagcaccctgcaagccagcctggccagctgctcagaccagcttgcagagccgcagccgctgtgggcagggggtgtggcaggagctcccagcactggagacccacggactcaacccagttacctcacatggggccttttctgagcaaggtctcgaaagcgcaggccgccctggctgagcagcaccgccctttcccagctgcactcgccctgtggacagccccgacacaccactttcctgaggctgtcgctcactcagattgtccgtttgctatgccgaatgcagccaaaattcctttttacaatttgtgatgccttaccgatttgatcttaatcctgtatttaaagttttctaacactgccttatactgtgtttctctttttgggggagcttaactgcttgttgctccctgtcgtctgcaccatagtaaatgccacaagggtagtcgaacacctctctggcccctagacctatctggggacaggctggctcagcctgtctccagggctgctgcggcccagccccgagcctgcctccctcttggcctctcatccattggctctgcagggcaggggtgaggcaggtttctgctcataagtgcttttggaagtcacctacctttttaacacagccgaactagtcccaacgcgtttgcaaatattcccctggtagcctacttccttacccccgaatattggtaagatcgagcaatggcttcaggacatgggttctcttctcctgtgatcattcaagtgctcactgcatgaagactggcttgtctcagtgtttcaacctcaccagggctgtctcttggtccacacctcgctccctgttagtgccgtatgacagcccccatcaaatgaccttggccaagtcacggtttctctgtggtcaaggttggttggctgattggtggaaagtagggtggaccaaaggaggccacgtgagcagtcagcaccagttctgcaccagcagcgcctccgtcctagtgggtgttcctgtttctcctggccctgggtgggctagggcctgattcgggaagatgcctttgcagggaggggaggataagtgggatctaccaattgattctggcaaaacaatttctaagatttttttgctttatgtgggaaacagatctaaatctcattttatgctgtattttatatcttagttgtgtttgaaaacgttttgatttttggaaacacatcaaaataaataatggcgtttgttgt

SEQ ID NO: 892 - DNA, 1970 bp, Homo sapiens
gcaggtggggagcttggcccgcggtcgtggttcccgccgtcctgtgcctttaaggctctcgccgctcaccagcatttggggctcctgctgtgtcggcccccagctgacttggctttaggggtcggcgtggagggttaaagaggccccggctgggtttgcggagcagccaagcctggcaaaatcgaaagggagggctcaaagagactgtatccttaacccccaaaaagctggtctaaaaggatgggaggccagaccgctgaccgttccccactctcgacagagtccagccgtgtggagcacacgatgctgcaaacttgcatgtcatctctttcaggtgtggcatttcaagggggcttgtgtcttgaaaacagcaactgtgaggacacttgatagtcatttccttcagttctgcttttgtctccctaggtgactgtggccttcccccagatgtacctaatgcccagccagctttggaaggccgtacaagttttcccgaggatactgtaataacgtacaaatgtgaagaaagctttgtgaaaattcctggcgagaaggactcagtgatctgccttaagggcagtcaatggtcagatattgaagagttctgcaatcgtagctgcgaggtgccaacaaggctaaattctgcatccctcaaacagccttatatcactcagaattattttccagtcggtactgttgtggaatatgagtgccgtccaggttacagaagagaaccttctctatcaccaaaactaacttgccttcagaatttaaaatggtccacagcagtcgaattttgtaaaaagaaatcatgccctaatccgggagaaatacgaaatggtcagattgatgtaccaggtggcatattatttggtgcaaccatctccttctcatgtaacacagggtacaaattatttggctcgacttctagtttttgtcttatttcaggcagctctgtccagtggagtgacccgttgccagagtgcagagaaatttattgtccagcaccaccacaaattgacaatggaataattcaaggggaacgtgaccattatggatatagacagtctgtaacgtatgcatgtaataaaggattcaccatgattggagagcactctatttattgtactgtgaataatgatgaaggagagtggagtggcccaccacctgaatgcagaggaaaatctctaacttccaaggtcccaccaacagttcagaaacctaccacagtaaatgttccaactacagaagtctcaccaacttctcagaaaaccaccacaaaaaccaccacaccaaatgctcaaggtacagagactccatcagttcttcaaaaacacaccacagaaaatgtttcagctacaagaaccccaccaactcctcagaaacccaccacagtaaatgtcccagctacaatagtcacaccaacacctcagaaacccaccacaataaatgttccagctacaggagtctcatcaacacctcaaagacacaccatagtaaatgtttcagctacaggaaccctaccaactcttcagaaacccaccagagcaaatgattcagccaccaaatccccagcagcagctcagacatctttcatatcaaaaaccctatctacaaagaccccttctgcagctcagaatcccatgatgacaaatgcttctgctacacaggccacactaacagcccaaaaattcaccacagcaaaagttgcatttacgcagagtccttcagcagcacgtaagtccactaatgtacattccccagtgactaatggtctcaagagtacacaaagattcccttctgctcatattacagcaacacggagtacacctgtttccaggacaaccaagcattttcatgaaacaaccccaaataaaggaagtggaaccacttcaggtactacccgtcttctatctgctcttataatgcacatgagagcaacaaagtactcaatgttgtgtttgaccatt

SEQ ID NO: 893 - DNA, 1846 bp, Homo sapiens
tatgacgccggagccctctgaccgcacctctgaccacaacaaacccctactccacccgtcttgtttgtcccacccttggtgacgcagagccccagcccagaccccgcccaaagcactcatttaactggtattgcggagccacgaggcttctgcttactgcaactcgctccggccgctgggcgtagctgcgactcggcggagtcccggcggcgcgtccttgttctaacccggcgcgccatgaccgtcgcgcggccgagcgtgcccgcggcgctgcccctcctcggggagctgccccggctgctgctgctggtgctgttgtgcctgccggccgtgtggggtgactgtggccttcccccagatgtacctaatgcccagccagctttggaaggccgtacaagttttcccgaggatactgtaataacgtacaaatgtgaagaaagctttgtgaaaattcctggcgagaaggactcagtgatctgccttaagggcagtcaatggtcagatattgaagagttctgcaatcgtagctgcgaggtgccaacaaggctaaattctgcatccctcaaacagccttatatcactcagaattattttccagtcggtactgttgtggaatatgagtgccgtccaggttacagaagagaaccttctctatcaccaaaactaacttgccttcagaatttaaaatggtccacagcagtcgaattttgtaaaaagaaatcatgccctaatccgggagaaatacgaaatggtcagattgatgtaccaggtggcatattatttggtgcaaccatctccttctcatgtaacacagggtacaaattatttggctcgacttctagtttttgtcttatttcaggcagctctgtccagtggagtgacccgttgccagagtgcagagaaatttattgtccagcaccaccacaaattgacaatggaataattcaaggggaacgtgaccattatggatatagacagtctgtaacgtatgcatgtaataaaggattcaccatgattggagagcactctatttattgtactgtgaataatgatgaaggagagtggagtggcccaccacctgaatgcagaggaaaatctctaacttccaaggtcccaccaacagttcagaaacctaccacagtaaatgttccaactacagaagtctcaccaacttctcagaaaaccaccacaaaaaccaccacaccaaatgctcaagcaacacggagtacacctgtttccaggacaaccaagcattttcatgaaacaaccccaaataaaggaagtggaaccacttcaggtactacccgtcttctatctgggcacacgtgtttcacgttgacaggtttgcttgggacgctagtaaccatgggcttgctgacttagccaaagaagagttaagaagaaaatacacacaagtatacagactgttcctagtttcttagacttatctgcatattggataaaataaatgcaattgtgctcttcatttaggatgctttcattgtctttaagatgtgttaggaatgtcaacagagcaaggagaaaaaaggcagtcctggaatcacattcttagcacacctacacctcttgaaaatagaacaacttgcagaattgagagtgattcctttcctaaaagtgtagtgatttttttccacaagatctgtaatgttatttccacttataaaggaaataaaaaatgaaaaacattatttggatatcaaaagcaaataaaaacccaattcagtctcttctaagcaaaattgctaaagagagatgaaccacattataaagtaatctttggctgtaaggcattttcatctttccttcgggttggcaaaatatttta

SEQ ID NO: 894 - DNA, 2640 bp, Homo sapiens
tatgacgccggagccctctgaccgcacctctgaccacaacaaacccctactccacccgtcttgtttgtcccacccttggtgacgcagagccccagcccagaccccgcccaaagcactcatttaactggtattgcggagccacgaggcttctgcttactgcaactcgctccggccgctgggcgtagctgcgactcggcggagtcccggcggcgcgtccttgttctaacccggcgcgccatgaccgtcgcgcggccgagcgtgcccgcggcgctgcccctcctcggggagctgccccggctgctgctgctggtgctgttgtgcctgccggccgtgtggggtgactgtggccttcccccagatgtacctaatgcccagccagctttggaaggccgtacaagttttcccgaggatactgtaataacgtacaaatgtgaagaaagctttgtgaaaattcctggcgagaaggactcagtgatctgccttaagggcagtcaatggtcagatattgaagagttctgcaatcgtagctgcgaggtgccaacaaggctaaattctgcatccctcaaacagccttatatcactcagaattattttccagtcggtactgttgtggaatatgagtgccgtccaggttacagaagagaaccttctctatcaccaaaactaacttgccttcagaatttaaaatggtccacagcagtcgaattttgtaaaaagaaatcatgccctaatccgggagaaatacgaaatggtcagattgatgtaccaggtggcatattatttggtgcaaccatctccttctcatgtaacacagggtacaaattatttggctcgacttctagtttttgtcttatttcaggcagctctgtccagtggagtgacccgttgccagagtgcagagaaatttattgtccagcaccaccacaaattgacaatggaataattcaaggggaacgtgaccattatggatatagacagtctgtaacgtatgcatgtaataaaggattcaccatgattggagagcactctatttattgtactgtgaataatgatgaaggagagtggagtggcccaccacctgaatgcagaggaaaatctctaacttccaaggtcccaccaacagttcagaaacctaccacagtaaatgttccaactacagaagtctcaccaacttctcagaaaaccaccacaaaaaccaccacaccaaatgctcaagcaacacggagtacacctgtttccaggacaaccaagcattttcatgaaacaaccccaaataaaggaagtggaaccacttcaggtactacccgtcttctatctgggcacacgtgtttcacgttgacaggtttgcttgggacgctagtaaccatgggcttgctgacttagccaaagaagagttaagaagaaaatacacacaagtatacagactgttcctagtttcttagacttatctgcatattggataaaataaatgcaattgtgctcttcatttaggatgctttcattgtctttaagatgtgttaggaatgtcaacagagcaaggagaaaaaaggcagtcctggaatcacattcttagcacacctacacctcttgaaaatagaacaacttgcagaattgagagtgattcctttcctaaaagtgtaagaaagcatagagatttgttcgtatttagaatgggatcacgaggaaaagagaaggaaagtgatttttttccacaagatctgtaatgttatttccacttataaaggaaataaaaaatgaaaaacattatttggatatcaaaagcaaataaaaacccaattcagtctcttctaagcaaaattgctaaagagagatgaaccacattataaagtaatctttggctgtaaggcattttcatctttccttcgggttggcaaaatattttaaaggtaaaacatgctggtgaaccaggggtgttgatggtgataagggaggaatatagaatgaaagactgaatcttcctttgttgcacaaatagagtttggaaaaagcctgtgaaaggtgtcttctttgacttaatgtctttaaaagtatccagagatactacaatattaacataagaaaagattatatattatttctgaatcgagatgtccatagtcaaatttgtaaatcttattcttttgtaatatttatttatatttatttatgacagtgaacattctgattttacatgtaaaacaagaaaagttgaagaagatatgtgaagaaaaatgtatttttcctaaatagaaataaatgatcccattttttggtatcatgtagtatgtgaaatttattcttaaacgtgactactttatttctaaataagaaattccctacctgcttcctacaagcagttcagaatgccatgccttggttgtcctagtgtgaataattttcagctactttaaaattatattgtactttctcaagcatgtcatatcctttcctattagagtatctatattacttgttactgatttacctgaaggcaatctgattaatttctaggtttttaccatattcttgtcatcttgccaattacattttaagtgttagactagactaagatgtactagttgtatagaatataactagatttattatggcaatgtttattttgtcattttgcttcatctg

SEQ ID NO: 895 - DNA, 1809 bp, Homo sapiens
gcaggtggggagcttggcccgcggtcgtggttcccgccgtcctgtgcctttaaggctctcgccgctcaccagcatttggggctcctgctgtgtcggcccccagctgacttggctttaggggtcggcgtggagggttaaagaggccccggctgggtttgcggagcagccaagcctggcaaaatcgaaagggagggctcaaagagactgtatccttaacccccaaaaagctggtctaaaaggatgggaggccagaccgctgaccgttccccactctcgacagagtccagccgtgtggagcacacgatgctgcaaacttgcatgtcatctctttcaggtgtggcatttcaagggggcttgtgtcttgaaaacagcaactgtgaggacacttgatagtcatttccttcagttctgcttttgtctccctaggtgactgtggccttcccccagatgtacctaatgcccagccagctttggaaggccgtacaagttttcccgaggatactgtaataacgtacaaatgtgaagaaagctttgtgaaaattcctggcgagaaggactcagtgatctgccttaagggcagtcaatggtcagatattgaagagttctgcaatcgtagctgcgaggtgccaacaaggctaaattctgcatccctcaaacagccttatatcactcagaattattttccagtcggtactgttgtggaatatgagtgccgtccaggttacagaagagaaccttctctatcaccaaaactaacttgccttcagaatttaaaatggtccacagcagtcgaattttgtaaaaagaaatcatgccctaatccgggagaaatacgaaatggtcagattgatgtaccaggtggcatattatttggtgcaaccatctccttctcatgtaacacagggtacaaattatttggctcgacttctagtttttgtcttatttcaggcagctctgtccagtggagtgacccgttgccagagtgcagagaaatttattgtccagcaccaccacaaattgacaatggaataattcaaggggaacgtgaccattatggatatagacagtctgtaacgtatgcatgtaataaaggattcaccatgattggagagcactctatttattgtactgtgaataatgatgaaggagagtggagtggcccaccacctgaatgcagagcaacacggagtacacctgtttccaggacaaccaagcattttcatgaaacaaccccaaataaaggaagtggaaccacttcaggtactacccgtcttctatctgggcacacgtgtttcacgttgacaggtttgcttgggacgctagtaaccatgggcttgctgacttagccaaagaagagttaagaagaaaatacacacaagtatacagactgttcctagtttcttagacttatctgcatattggataaaataaatgcaattgtgctcttcatttaggatgctttcattgtctttaagatgtgttaggaatgtcaacagagcaaggagaaaaaaggcagtcctggaatcacattcttagcacacctacacctcttgaaaatagaacaacttgcagaattgagagtgattcctttcctaaaagtgtagtgatttttttccacaagatctgtaatgttatttccacttataaaggaaataaaaaatgaaaaacattatttggatatcaaaagcaaataaaaacccaattcagtctcttctaagcaaaattgctaaagagagatgaaccacattataaagtaatctttggctgtaaggcattttcatctttccttcgggttggcaaaatatttta

SEQ ID NO: 896 - DNA, 1964 bp, Homo sapiens
tatgacgccggagccctctgaccgcacctctgaccacaacaaacccctactccacccgtcttgtttgtcccacccttggtgacgcagagccccagcccagaccccgcccaaagcactcatttaactggtattgcggagccacgaggcttctgcttactgcaactcgctccggccgctgggcgtagctgcgactcggcggagtcccggcggcgcgtccttgttctaacccggcgcgccatgaccgtcgcgcggccgagcgtgcccgcggcgctgcccctcctcggggagctgccccggctgctgctgctggtgctgttgtgcctgccggccgtgtggggtgactgtggccttcccccagatgtacctaatgcccagccagctttggaaggccgtacaagttttcccgaggatactgtaataacgtacaaatgtgaagaaagctttgtgaaaattcctggcgagaaggactcagtgatctgccttaagggcagtcaatggtcagatattgaagagttctgcaatcgtagctgcgaggtgccaacaaggctaaattctgcatccctcaaacagccttatatcactcagaattattttccagtcggtactgttgtggaatatgagtgccgtccaggttacagaagagaaccttctctatcaccaaaactaacttgccttcagaatttaaaatggtccacagcagtcgaattttgtaaaaagaaatcatgccctaatccgggagaaatacgaaatggtcagattgatgtaccaggtggcatattatttggtgcaaccatctccttctcatgtaacacagggtacaaattatttggctcgacttctagtttttgtcttatttcaggcagctctgtccagtggagtgacccgttgccagagtgcagagaaatttattgtccagcaccaccacaaattgacaatggaataattcaaggggaacgtgaccattatggatatagacagtctgtaacgtatgcatgtaataaaggattcaccatgattggagagcactctatttattgtactgtgaataatgatgaaggagagtggagtggcccaccacctgaatgcagaggaaaatctctaacttccaaggtcccaccaacagttcagaaacctaccacagtaaatgttccaactacagaagtctcaccaacttctcagaaaaccaccacaaaaaccaccacaccaaatgctcaagcaacacggagtacacctgtttccaggacaaccaagcattttcatgaaacaaccccaaataaaggaagtggaaccacttcaggtactacccgtcttctatctggttctcgtcctgtcacccaggctggtatgcggtggtgtgatcgtagctcactgcagtctcgaactcctgggttcaagcgatccttccacttcagcctcccaagtagctggtactacagggcacacgtgtttcacgttgacaggtttgcttgggacgctagtaaccatgggcttgctgacttagccaaagaagagttaagaagaaaatacacacaagtatacagactgttcctagtttcttagacttatctgcatattggataaaataaatgcaattgtgctcttcatttaggatgctttcattgtctttaagatgtgttaggaatgtcaacagagcaaggagaaaaaaggcagtcctggaatcacattcttagcacacctacacctcttgaaaatagaacaacttgcagaattgagagtgattcctttcctaaaagtgtagtgatttttttccacaagatctgtaatgttatttccacttataaaggaaataaaaaatgaaaaacattatttggatatcaaaagcaaataaaaacccaattcagtctcttctaagcaaaattgctaaagagagatgaaccacattataaagtaatctttggctgtaaggcattttcatctttccttcgggttggcaaaatatttta

SEQ ID NO: 897 - DNA, 2367 bp, Homo sapiens
gcaggtggggagcttggcccgcggtcgtggttcccgccgtcctgtgcctttaaggctctcgccgctcaccagcatttggggctcctgctgtgtcggcccccagctgacttggctttaggggtcggcgtggagggttaaagaggccccggctgggtttgcggagcagccaagcctggcaaaatcgaaagggagggctcaaagagactgtatccttaacccccaaaaagctggtctaaaaggatgggaggccagaccgctgaccgttccccactctcgacagagtccagccgtgtggagcacacgatgctgcaaacttgcatgtcatctctttcaggtgtggcatttcaagggggcttgtgtcttgaaaacagcaactgtgaggacacttgatagtcatttccttcagttctgcttttgtctccctaggtgactgtggccttcccccagatgtacctaatgcccagccagctttggaaggccgtacaagttttcccgaggatactgtaataacgtacaaatgtgaagaaagctttgtgaaaattcctggcgagaaggactcagtgatctgccttaagggcagtcaatggtcagatattgaagagttctgcaatcgtagctgcgaggtgccaacaaggctaaattctgcatccctcaaacagccttatatcactcagaattattttccagtcggtactgttgtggaatatgagtgccgtccaggttacagaagagaaccttctctatcaccaaaactaacttgccttcagaatttaaaatggtccacagcagtcgaattttgtaaaaagaaatcatgccctaatccgggagaaatacgaaatggtcagattgatgtaccaggtggcatattatttggtgcaaccatctccttctcatgtaacacagggtacaaattatttggctcgacttctagtttttgtcttatttcaggcagctctgtccagtggagtgacccgttgccagagtgcagagaaatttattgtccagcaccaccacaaattgacaatggaataattcaaggggaacgtgaccattatggatatagacagtctgtaacgtatgcatgtaataaaggattcaccatgattggagagcactctatttattgtactgtgaataatgatgaaggagagtggagtggcccaccacctgaatgcagaggaaaatctctaacttccaaggtcccaccaacagttcagaaacctaccacagtaaatgttccaactacagaagtctcaccaacttctcagaaaaccaccacaaaaaccaccacaccaaatgctcaaggtacagagactccatcagttcttcaaaaacacaccacagaaaatgtttcagctacaagaaccccaccaactcctcagaaacccaccacagtaaatgtcccagctacaatagtcacaccaacacctcagaaacccaccacaataaatgttccagctacaggagtctcatcaacacctcaaagacacaccatagtaaatgtttcagctacaggaaccctaccaactcttcagaaacccaccagagcaaatgattcagccaccaaatccccagcagcagctcagacatctttcatatcaaaaaccctatctacaaagaccccttctgcagctcagaatcccatgatgacaaatgcttctgctacacaggccacactaacagcccaaaaattcaccacagcaaaagttgcatttacgcagagtccttcagcagcaccaacacggagtacacctgtttccaggacaaccaagcattttcatgaaacaaccccaaataaaggaagtggaaccacttcaggtactacccgtcttctatctgggcacacgtgtttcacgttgacaggtttgcttgggacgctagtaaccatgggcttgctgacttagccaaagaagagttaagaagaaaatacacacaagtatacagactgttcctagtttcttagacttatctgcatattggataaaataaatgcaattgtgctcttcatttaggatgctttcattgtctttaagatgtgttaggaatgtcaacagagcaaggagaaaaaaggcagtcctggaatcacattcttagcacacctacacctcttgaaaatagaacaacttgcagaattgagagtgattcctttcctaaaagtgtagtgatttttttccacaagatctgtaatgttatttccacttataaaggaaataaaaaatgaaaaacattatttggatatcaaaagcaaataaaaacccaattcagtctcttctaagcaaaattgctaaagagagatgaaccacattataaagtaatctttggctgtaaggcattttcatctttccttcgggttggcaaaatatttta

SEQ ID NO: 898 - DNA, 1526 bp, Homo sapiens
tatgacgccggagccctctgaccgcacctctgaccacaacaaacccctactccacccgtcttgtttgtcccacccttggtgacgcagagccccagcccagaccccgcccaaagcactcatttaactggtattgcggagccacgaggcttctgcttactgcaactcgctccggccgctgggcgtagctgcgactcggcggagtcccggcggcgcgtccttgttctaacccggcgcgccatgaccgtcgcgcggccgagcgtgcccgcggcgctgcccctcctcggggagctgccccggctgctgctgctggtgctgttgtgcctgccggccgtgtggggtgactgtggccttcccccagatgtacctaatgcccagccagctttggaaggccgtacaagttttcccgaggatactgtaataacgtacaaatgtgaagaaagctttgtgaaaattcctggcgagaaggactcagtgatctgccttaagggcagtcaatggtcagatattgaagagttctgcaatcgtagctgcgaggtgccaacaaggctaaattctgcatccctcaaacagccttatatcactcagaattattttccagtcggtactgttgtggaatatgagtgccgtccaggttacagaagagaaccttctctatcaccaaaactaacttgccttcagaatttaaaatggtccacagcagtcgaattttgtaaaaagaaatcatgccctaatccgggagaaatacgaaatggtcagattgatgtaccaggtggcatattatttggtgcaaccatctccttctcatgtaacacagggtaagtttgggcatactaaaaccctgtatttaggaaatgagaaaacaaattaggacttaaggtgagattgttagtttcatgactggtattcacagctagtagcaattaaaacaatccctctcctcaaagacccttcatcatgagctcatcacagttaaatttagtaaaatgggggcaagaaaggaagatttcttaaaccaccagaattctctaaattctgatttcagtaaatatgtgattcaatataaaattttaaatgtgattaataaaaaaatttgagatgatgatacttgcagaaatcttcaaatgttaaatactaaaccaatctttagttgacctaaataatgaatttgcatgagtttttctatatgcaaacaagctgttacaaaacagcatgagttaaagacattcctagtgtgaaagtattctaagttctttgataagttctctgtatagggagaaggaactcattcattgagtaccatcaatgtctcagacactgttgaaaactttacatttattttctcatttcatatctgtaaattaaataattctattttactctgtgtgtgtccctattctttataaagtaaaaatatcagtatcacttgtctcctatacgaaacacagatattggttaggtcatgaacacaaaatctgggaagtactttgaaccctttaaatataagtacattctattattctgtgaag

SEQ ID NO: 899 - DNA, 1935 bp, Homo sapiens
gcaggtggggagcttggcccgcggtcgtggttcccgccgtcctgtgcctttaaggctctcgccgctcaccagcatttggggctcctgctgtgtcggcccccagctgacttggctttaggggtcggcgtggagggttaaagaggccccggctgggtttgcggagcagccaagcctggcaaaatcgaaagggagggctcaaagagactgtatccttaacccccaaaaagctggtctaaaaggatgggaggccagaccgctgaccgttccccactctcgacagagtccagccgtgtggagcacacgatgctgcaaacttgcatgtcatctctttcaggtgtggcatttcaagggggcttgtgtcttgaaaacagcaactgtgaggacacttgatagtcatttccttcagttctgcttttgtctccctaggtgactgtggccttcccccagatgtacctaatgcccagccagctttggaaggccgtacaagttttcccgaggatactgtaataacgtacaaatgtgaagaaagctttgtgaaaattcctggcgagaaggactcagtgatctgccttaagggcagtcaatggtcagatattgaagagttctgcaatcgtagctgcgaggtgccaacaaggctaaattctgcatccctcaaacagccttatatcactcagaattattttccagtcggtactgttgtggaatatgagtgccgtccaggttacagaagagaaccttctctatcaccaaaactaacttgccttcagaatttaaaatggtccacagcagtcgaattttgtaaaaagaaatcatgccctaatccgggagaaatacgaaatggtcagattgatgtaccaggtggcatattatttggtgcaaccatctccttctcatgtaacacagggtacaaattatttggctcgacttctagtttttgtcttatttcaggcagctctgtccagtggagtgacccgttgccagagtgcagagaaatttattgtccagcaccaccacaaattgacaatggaataattcaaggggaacgtgaccattatggatatagacagtctgtaacgtatgcatgtaataaaggattcaccatgattggagagcactctatttattgtactgtgaataatgatgaaggagagtggagtggcccaccacctgaatgcagaggaaaatctctaacttccaaggtcccaccaacagttcagaaacctaccacagtaaatgttccaactacagaagtctcaccaacttctcagaaaaccaccacaaaaaccaccacaccaaatgctcaagcaacacggagtacacctgtttccaggacaaccaagcattttcatgaaacaaccccaaataaaggaagtggaaccacttcaggtactacccgtcttctatctgggcacacgtgtttcacgttgacaggtttgcttgggacgctagtaaccatgggcttgctgacttagccaaagaagagttaagaagaaaatacacacaagtatacagactgttcctagtttcttagacttatctgcatattggataaaataaatgcaattgtgctcttcatttaggatgctttcattgtctttaagatgtgttaggaatgtcaacagagcaaggagaaaaaaggcagtcctggaatcacattcttagcacacctacacctcttgaaaatagaacaacttgcagaattgagagtgattcctttcctaaaagtgtagtgatttttttccacaagatctgtaatgttatttccacttataaaggaaataaaaaatgaaaaacattatttggatatcaaaagcaaataaaaacccaattcagtctcttctaagcaaaattgctaaagagagatgaaccacattataaagtaatctttggctgtaaggcattttcatctttccttcgggttggcaaaatatttta

SEQ ID NO: 900 - DNA, 1636 bp, Homo sapiens
gcaggtggggagcttggcccgcggtcgtggttcccgccgtcctgtgcctttaaggctctcgccgctcaccagcatttggggctcctgctgtgtcggcccccagctgacttggctttaggggtcggcgtggagggttaaagaggccccggctgggtttgcggagcagccaagcctggcaaaatcgaaagggagggctcaaagagactgtatccttaacccccaaaaagctggtctaaaaggatgggaggccagaccgctgaccgttccccactctcgacagagtccagccgtgtggagcacacgatgctgcaaacttgcatgtcatctctttcaggtgtggcatttcaagggggcttgtgtcttgaaaacagcaactgtgaggacacttgatagtcatttccttcagttctgcttttgtctccctaggtgactgtggccttcccccagatgtacctaatgcccagccagctttggaaggccgtacaagttttcccgaggatactgtaataacgtacaaatgtgaagaaagctttgtgaaaattcctggcgagaaggactcagtgatctgccttaagggcagtcaatggtcagatattgaagagttctgcaatcgtagctgcgaggtgccaacaaggctaaattctgcatccctcaaacagccttatatcactcagaattattttccagtcggtactgttgtggaatatgagtgccgtccaggttacagaagagaaccttctctatcaccaaaactaacttgccttcagaatttaaaatggtccacagcagtcgaattttgtaaaaagaaatcatgccctaatccgggagaaatacgaaatggtcagattgatgtaccaggtggcatattatttggtgcaaccatctccttctcatgtaacacagggtacaaattatttggctcgacttctagtttttgtcttatttcaggcagctctgtccagtggagtgacccgttgccagagtgcagagaaatttattgtccagcaccaccacaaattgacaatggaataattcaaggggaacgtgaccattatggatatagacagtctgtaacgtatgcatgtaataaaggattcaccatgattggagagcactctatttattgtactgtgaataatgatgaaggagagtggagtggcccaccacctgaatgcagaggaaaatctctaacttccaaggtcccaccaacagttcagaaacctaccacagtaaatgttccaactacagaagtctcaccaacttctcagaaaaccaccacaaaaaccaccacaccaaatgctcaagcaacacggagtacacctgtttccaggacaaccaagcattttcatgaaacaaccccaaataaaggaagtggaaccacttcaggtcagttgacactgttcaggtttactgagtatggatctaatgtgctatggtggaaatatgaacttgaccaagattgcaggattaaatggtctctaatttattgtagccagggtttttcatactaatactttttactttatttggaagcggacttggattgtactagggcaaatctttaaaaaaagaaacatttacaataatagagaaaaagactgtggccccattaaaaaaatgctaaattaagattggt

SEQ ID NO: 901 - DNA, 2445 bp, Homo sapiens
gcaggtggggagcttggcccgcggtcgtggttcccgccgtcctgtgcctttaaggctctcgccgctcaccagcatttggggctcctgctgtgtcggcccccagctgacttggctttaggggtcggcgtggagggttaaagaggccccggctgggtttgcggagcagccaagcctggcaaaatcgaaagggagggctcaaagagactgtatccttaacccccaaaaagctggtctaaaaggatgggaggccagaccgctgaccgttccccactctcgacagagtccagccgtgtggagcacacgatgctgcaaacttgcatgtcatctctttcaggtgtggcatttcaagggggcttgtgtcttgaaaacagcaactgtgaggacacttgatagtcatttccttcagttctgcttttgtctccctaggtgactgtggccttcccccagatgtacctaatgcccagccagctttggaaggccgtacaagttttcccgaggatactgtaataacgtacaaatgtgaagaaagctttgtgaaaattcctggcgagaaggactcagtgatctgccttaagggcagtcaatggtcagatattgaagagttctgcaatcgtagctgcgaggtgccaacaaggctaaattctgcatccctcaaacagccttatatcactcagaattattttccagtcggtactgttgtggaatatgagtgccgtccaggttacagaagagaaccttctctatcaccaaaactaacttgccttcagaatttaaaatggtccacagcagtcgaattttgtaaaaagaaatcatgccctaatccgggagaaatacgaaatggtcagattgatgtaccaggtggcatattatttggtgcaaccatctccttctcatgtaacacagggtacaaattatttggctcgacttctagtttttgtcttatttcaggcagctctgtccagtggagtgacccgttgccagagtgcagagaaatttattgtccagcaccaccacaaattgacaatggaataattcaaggggaacgtgaccattatggatatagacagtctgtaacgtatgcatgtaataaaggattcaccatgattggagagcactctatttattgtactgtgaataatgatgaaggagagtggagtggcccaccacctgaatgcagaggaaaatctctaacttccaaggtcccaccaacagttcagaaacctaccacagtaaatgttccaactacagaagtctcaccaacttctcagaaaaccaccacaaaaaccaccacaccaaatgctcaaggtacagagactccatcagttcttcaaaaacacaccacagaaaatgtttcagctacaagaaccccaccaactcctcagaaacccaccacagtaaatgtcccagctacaatagtcacaccaacacctcagaaacccaccacaataaatgttccagctacaggagtctcatcaacacctcaaagacacaccatagtaaatgtttcagctacaggaaccctaccaactcttcagaaacccaccagagcaaatgattcagccaccaaatccccagcagcagctcagacatctttcatatcaaaaaccctatctacaaagaccccttctgcagctcagaatcccatgatgacaaatgcttctgctacacaggccacactaacagcccaaaaattcaccacagcaaaagttgcatttacgcagagtccttcagcagcacgtaagtccactaatgtacattccccagtgactaatggtctcaagagtacacaaagattcccttctgctcatattacagcaacacggagtacacctgtttccaggacaaccaagcattttcatgaaacaaccccaaataaaggaagtggaaccacttcaggtactacccgtcttctatctgggcacacgtgtttcacgttgacaggtttgcttgggacgctagtaaccatgggcttgctgacttagccaaagaagagttaagaagaaaatacacacaagtatacagactgttcctagtttcttagacttatctgcatattggataaaataaatgcaattgtgctcttcatttaggatgctttcattgtctttaagatgtgttaggaatgtcaacagagcaaggagaaaaaaggcagtcctggaatcacattcttagcacacctacacctcttgaaaatagaacaacttgcagaattgagagtgattcctttcctaaaagtgtagtgatttttttccacaagatctgtaatgttatttccacttataaaggaaataaaaaatgaaaaacattatttggatatcaaaagcaaataaaaacccaattcagtctcttctaagcaaaattgctaaagagagatgaaccacattataaagtaatctttggctgtaaggcattttcatctttccttcgggttggcaaaatatttta

SEQ ID NO: 902 - DNA, 2768 bp, Homo sapiens
gccacgtgtccggctcggagcccacggctgtcctcccggtccgccccgcgctgcggttgctgctgggctaacgggctccgatccagcgagcgctgcgtcctcgagtccctgcgcccgtgcgtccgtctgcgacccgaggcctccgctgcgcgtggattctgctgcgaaccggagaccatggccaaaccagcacagggtgccaagtaccggggctccatccatgacttcccaggctttgaccccaaccaggatgccgaggctctgtacactgccatgaagggctttggcagtgacaaggaggccatactggacataatcacctcacggagcaacaggcagaggcaggaggtctgccagagctacaagtccctctacggcaaggacctcattgctgatttaaagtatgaattgacgggcaagtttgaacggttgattgtgggcctgatgaggccacctgcctattgtgatgccaaagaaattaaagatgccatctcgggcattggcactgatgagaagtgcctcattgagatcttggcttcccggaccaatgagcagatgcaccagctggtggcagcatacaaagatgcctacgagcgggacctggaggctgacatcatcggcgacacctctggccacttccagaagatgcttgtggtcctgctccagggaaccagggaggaggatgacgtagtgagcgaggacctggtacaacaggatgtccaggacctatacgaggcaggggaactgaaatggggaacagatgaagcccagttcatttacatcttgggaaatcgcagcaagcagcatcttcggttggtgttcgatgagtatctgaagaccacagggaagccgattgaagccagcatccgaggggagctgtctggggactttgagaagctaatgctggccgtagtgaagtgtatccggagcaccccggaatattttgctgaaaggctcttcaaggctatgaagggcctggggactcgggacaacaccctgatccgcatcatggtctcccgtagtgagttggacatgctcgacattcgggagatcttccggaccaagtatgagaagtccctctacagcatgatcaagaatgacacctctggcgagtacaagaagactctgctgaagctgtctgggggagatgatgatgctgctggccagttcttcccggaggcagcgcaggtggcctatcagatgtgggaacttagtgcagtggcccgagtagagctgaagggaactgtgcgcccagccaatgacttcaaccctgacgcagatgccaaagcgctgcggaaagccatgaagggactcgggactgacgaagacacaatcatcgatatcatcacgcaccgcagcaatgtccagcggcagcagatccggcagaccttcaagtctcactttggccgggacttaatgactgacctgaagtctgagatctctggagacctggcaaggctgattctggggctcatgatgccaccggcccattacgatgccaagcagttgaagaaggccatggagggagccggcacagatgaaaaggctcttattgaaatcctggccactcggaccaatgctgaaatccgggccatcaatgaggcctataaggaggactatcacaagtccctggaggatgctctgagctcagacacatctggccacttcaggaggatcctcatttctctggccacggggcatcgtgaggagggaggagaaaacctggaccaggcacgggaagatgcccaggtggctgctgagatcttggaaatagcagacacacccagtggagacaaaacttccttggagacacgtttcatgacgatcctgtgtacccggagctatccgcacctccggagagtcttccaggagttcatcaagatgaccaactatgacgtggagcacaccatcaagaaggagatgtctggggatgtcagggatgcatttgtggccattgttcaaagtgtcaagaacaagcctctcttctttgccgacaaactttacaaatccatgaagggtgctggcacagatgagaagactctgaccaggatcatggtatcccgcagtgagattgacctgctcaacatccggagggaattcattgagaaatatgacaagtctctccaccaagccattgagggtgacacctccggagacttcctgaaggccttgctggctctctgtggtggtgaggactagggccacagctttggcgggcacttctgccaagaaatggttatcagcaccagccgccatggccaagcctgattgttccagctccagagactaaggaaggggcaggggtggggggaggggttgggttgggctcttatcttcagtggagcttaggaaacgctcccactcccacgggccatcgagggcccagcacggctgagcggctgaaaaaccgtagccatagatcctgtccacctccactcccctctgaccctcaggctttcccagcttcctccccttgctacagcctctgccctggtttgggctatgtcagatccaaaaacatcctgaacctctgtctgtaaaatgagtagtgtctgtactttgaatgagggggttggtggcaggggccagttgaatgtgctgggcggggtggtgggaaggatagtaaatgtgctggggcaaactgacaaatcttcccatccatttcaccacccatctccatccaggccgcgctagagtactggaccaggaatttggatgcctgggttcaaatctgcatctgccatgcacttgtttctgaccttaggcca

SEQ ID NO: 903 - DNA, 2750 bp, Homo sapiens
gccacgtgtccggctcggagcccacggctgtcctcccggtccgccccgcgctgcggttgctgctgggctaacgggctccgatccagcgagcgctgcgtcctcgagtccctgcgcccgtgcgtccgtctgcgacccgaggcctccgctgcgcgtggattctgctgcgaaccggagaccatggccaaaccagcacagggtgccaagtaccggggctccatccatgacttcccaggctttgaccccaaccaggatgccgaggctctgtacactgccatgaagggctttggcagtgacaaggaggccatactggacataatcacctcacggagcaacaggcagaggcaggaggtctgccagagctacaagtccctctacggcaaggacctcattgctgatttaaagtatgaattgacgggcaagtttgaacggttgattgtgggcctgatgaggccacctgcctattgtgatgccaaagaaattaaagatgccatctcgggcattggcactgatgagaagtgcctcattgagatcttggcttcccggaccaatgagcagatgcaccagctggtggcagcatacaaagatgcctacgagcgggacctggaggctgacatcatcggcgacacctctggccacttccagaagatgcttgtggtcctgctccagggaaccagggaggaggatgacgtagtgagcgaggacctggtacaacaggatgtccaggacctatacgaggcaggggaactgaaatggggaacagatgaagcccagttcatttacatcttgggaaatcgcagcaagcagcatcttcggttggtgttcgatgagtatctgaagaccacagggaagccgattgaagccagcatccgaggggagctgtctggggactttgagaagctaatgctggccgtagtgaagtgtatccggagcaccccggaatattttgctgaaaggctcttcaaggctatgaagggcctggggactcgggacaacaccctgatccgcatcatggtctcccgtagtgagttggacatgctcgacattcgggagatcttccggaccaagtatgagaagtccctctacagcatgatcaagaatgacacctctggcgagtacaagaagactctgctgaagctgtctgggggagatgatgatgctgctggccagttcttcccggaggcagcgcaggtggcctatcagatgtgggaacttagtgcagtggcccgagtagagctgaagggaactgtgcgcccagccaatgacttcaaccctgacgcagatgccaaagcgctgcggaaagccatgaagggactcgggactgacgaagacacaatcatcgatatcatcacgcaccgcagcaatgtccagcggcagcagatccggcagaccttcaagtctcactttggccgggacttaatgactgacctgaagtctgagatctctggagacctggcaaggctgattctggggctcatgatgccaccggcccattacgatgccaagcagttgaagaaggccatggagggagccggcacagatgaaaaggctcttattgaaatcctggccactcggaccaatgctgaaatccgggccatcaatgaggcctataaggaggactatcacaagtccctggaggatgctctgagctcagacacatctggccacttcaggaggatcctcatttctctggccacggggcatcgtgaggagggaggagaaaacctggaccaggcacgggaagatgcccaggaaatagcagacacacccagtggagacaaaacttccttggagacacgtttcatgacgatcctgtgtacccggagctatccgcacctccggagagtcttccaggagttcatcaagatgaccaactatgacgtggagcacaccatcaagaaggagatgtctggggatgtcagggatgcatttgtggccattgttcaaagtgtcaagaacaagcctctcttctttgccgacaaactttacaaatccatgaagggtgctggcacagatgagaagactctgaccaggatcatggtatcccgcagtgagattgacctgctcaacatccggagggaattcattgagaaatatgacaagtctctccaccaagccattgagggtgacacctccggagacttcctgaaggccttgctggctctctgtggtggtgaggactagggccacagctttggcgggcacttctgccaagaaatggttatcagcaccagccgccatggccaagcctgattgttccagctccagagactaaggaaggggcaggggtggggggaggggttgggttgggctcttatcttcagtggagcttaggaaacgctcccactcccacgggccatcgagggcccagcacggctgagcggctgaaaaaccgtagccatagatcctgtccacctccactcccctctgaccctcaggctttcccagcttcctccccttgctacagcctctgccctggtttgggctatgtcagatccaaaaacatcctgaacctctgtctgtaaaatgagtagtgtctgtactttgaatgagggggttggtggcaggggccagttgaatgtgctgggcggggtggtgggaaggatagtaaatgtgctggggcaaactgacaaatcttcccatccatttcaccacccatctccatccaggccgcgctagagtactggaccaggaatttggatgcctgggttcaaatctgcatctgccatgcacttgtttctgaccttaggcca

SEQ ID NO: 904 - DNA, 2510 bp, Homo sapiens
gccacgtgtccggctcggagcccacggctgtcctcccggtccgcgccgctgcggttgctgctgggctaacgggctccgatccagcgagcgctgcgtcctcgagtccgcccgtgcgggcgcagggacccgaggcctccgctgcggctggattctgctgcgaaccggagaccatggccaaaccagcacagggtgccaagtaccggggctccatccatgacttcccaggctttgaccccaaccaggatgccgaggctctgtacactgccatgaagggctttggcagtgacaaggaggccatactggacataatcacctcacggagcaacaggcagaggcaggaggtctgccagagctacaagtccctctacggcaaggacctcattgctgatttaaagtatgaattgacgggcaagtttgaacggttgattgtgggcctgatgaggccacctgcctattgtgatgccaaagaaattaaagatgccatctcgggcattggcactgatgagaagtgcctcattgagatcttggcttcccggaccaatgagcagatgcaccagctggtggcagcatacaaagatgcctacgagcgggacctggaggctgacatcatcggcgacacctctggccacttccagaagatgcttgtggtcctgctccagggaaccagggaggaggatgacgtagtgagcgaggacctggtacaacaggatgtccaggacctatacgaggcaggggaactgaaatggggaacagatgaagcccagttcatttacatcttgggaaatcgcagcaagcagcatcttcggttggtgttcgatgagtatctgaagaccacagggaagccgatgaaggccagcatccgaggggagctgtctggggactttgagaagctaatgctggccgtagtgaagtgtatccggagcaccccggaatattttgctgaaaggctcttcaaggctatgaagggcctggggactcgggacaacaccctgatccgcatcatggtctcccgtagtgagttggacatgctcgacattcgggagatcttccggaccaagtatgagaagtccctctacagcatgatcaagaatgacacctctggcgagtacaagaagactctgctgaagctgtctgggggagatgatgatgctgctggccagttcttcccggaggcagcgcaggtggcctatcagatgtgggaacttagtgcagtggcccgagtagagctgaagggaactgtgcgcccagccaatgacttcaaccctgacgcagatgccaaagcgctgcggaaagccatgaagggactcgggactgacgaagacacaatcatcgatatcatcacgcaccgcagcaatgtccagcggcagcagatccggcagaccttcaagtctcactttggccgggacttaatgactgacctgaagtctgagatctctggagacctggcaaggctgattctggggctcatgatgccaccggcccattacgatgccaagcagttgaagaaggccatggagggagccggcacagatgaaaaggctcttattgaaatcctggccactcggaccaatgctgaaatccgggccatcaatgaggcctataaggaggactatcacaagtccctggaggatgctctgagctcagacacatctggccacttcaggaggatcctcatttctctggccacggggcatcgtgaggagggaggagaaaacctggaccaggcacgggaagatgcccaggaaatagcagacacacctagtggagacaaaacttccttggagacacgtttcatgacgatcctgtgtacccggacgtatccgcacctccggagagtcttccaggagttcatcaagatgaccaactatgacgtggagcacaccatcaagaaggagatgtctggggatgtcagggatgcatttgtggccattgttcaaagtgtcaagaacaagcctctcttctttgccgacaaactttacaaatccatgaagggtgctggcacagatgagaagactctgaccaggatcatggtatcccgcagtgagattgacctgctcaacatccggagggaattcattgagaaatatgacaagtctctccaccaagccattgagggtgacacctccggagacttcctgaaggccttgctggctctctgtggtggtgaggactagggccacagctttggcgggcacttctgccaagaaatggttatcagcaccagccgccatggccaagcctgattgttccagctccagagactaaggaaggggcaggggtggggggaggggttgggttgggctcttatcttcatggagcttaggaaacgctcccactcccacgggccatcgagggccagcacggctgagcggtgaaaaaccgtagccatagatcctgtccacctccactcccctctgaccctcaggctttcccagcttcctccccttgctacagcctctgccctggtttggctatgtcagatccaataaacatcctgaacctctgtctgt

SEQ ID NO: 905 - DNA, 2735 bp, Homo sapiens
gccacgtgtccggctcggagcccacggctgtcctcccggtccgccccgcgctgcggttgctgctgggctaacgggctccgatccagcgagcgctgcgtcctcgagtccctgcgcccgtgcgtccgtctgcgacccgaggcctccgctgcgcgtggattctgctgcgaaccggagaccatggccaaaccagcacagggtgccaagtaccggggctccatccatgacttcccaggctttgaccccaaccaggatgccgaggctctgtacactgccatgaagggctttggcagtgacaaggaggccatactggacataatcacctcacggagcaacaggcagaggcaggaggtctgccagagctacaagtccctctacggcaaggacctcattgctgatttaaagtatgaattgacgggcaagtttgaacggttgattgtgggcctgatgaggccacctgcctattgtgatgccaaagaaattaaagatgccatctcgggcattggcactgatgagaagtgcctcattgagatcttggcttcccggaccaatgagcagatgcaccagctggtggcagcatacaaagatgcctacgagcgggacctggaggctgacatcatcggcgacacctctggccacttccagaagatgcttgtggtcctgctccagggaaccagggaggaggatgacgtagtgagcgaggacctggtacaacaggatgtccaggacctatacgaggcaggggaactgaaatggggaacagatgaagcccagttcatttacatcttgggaaatcgcagcaagcagcatcttcggttggtgttcgatgagtatctgaagaccacagggaagccgattgaagccagcatccgaggggagctgtctggggactttgagaagctaatgctggccgtagtgaagtgtatccggagcaccccggaatattttgctgaaaggctcttcaaggctatgaagggcctggggactcgggacaacaccctgatccgcatcatggtctcccgtagtgagttggacatgctcgacattcgggagatcttccggaccaagtatgagaagtccctctacagcatgatcaagaatgacacctctggcgagtacaagaagactctgctgaagctgtctgggggagatgatgatgctgctggccagttcttcccggaggcagcgcaggtggcctatcagatgtgggaacttagtgcagtggcccgagtagagctgaagggaactgtgcgcccagccaatgacttcaaccctgacgcagatgccaaagcgctgcggaaagccatgaagggactcgggactgacgaagacacaatcatcgatatcatcacgcaccgcagcaatgtccagcggcagcagatccggcagaccttcaagtctcactttggccgggacttaatgactgacctgaagtctgagatctctggagacctggcaaggctgattctggggctcatgatgccaccggcccattacgatgccaagcagttgaagaaggccatggagggagccggcacagatgaaaaggctcttattgaaatcctggccactcggaccaatgctgaaatccgggccatcaatgaggcctataaggaggactatcacaagtccctggaggatgctctgagctcagacacatctggccacttcaggaggatcctcatttctctggccacggggcatcgtgaggagggaggagaaaacctggaccaggcacgggaagatgcccaggtggctgctgagatcttggaaatagcagacacacccagtggagacaaaacttccttggagacacgtttcatgacgatcctgtgtacccggagctatccgcacctccggagagtcttccaggagttcatcaagatgaccaactatgacgtggagcacaccatcaagaaggagatgtctggggatgtcagggatgcatttgtggccattgttcaaagtgtcaagaacaagcctctcttctttgccgacaaactttacaaatccatgaagggtgctggcacagatgagaagactctgaccaggatcatggtatcccgcagtgagattgacctgctcaacatccggagggaattcattgagaaatatgacaagtctctccaccaagccattgagggtgacacctccggagacttcctgaaggccttgctggctctctgtggtggtgaggactagggccacagctttggcgggcacttctgccaagcctgattgttccagctccagagactaaggaaggggcaggggtggggggaggggttgggttgggctcttatcttcagtggagcttaggaaacgctcccactcccacgggccatcgagggcccagcacggctgagcggctgaaaaaccgtagccatagatcctgtccacctccactcccctctgaccctcaggctttcccagcttcctccccttgctacagcctctgccctggtttgggctatgtcagatccaaaaacatcctgaacctctgtctgtaaaatgagtagtgtctgtactttgaatgagggggttggtggcaggggccagttgaatgtgctgggcggggtggtgggaaggatagtaaatgtgctggggcaaactgacaaatcttcccatccatttcaccacccatctccatccaggccgcgctagagtactggaccaggaatttggatgcctgggttcaaatctgcatctgccatgcacttgtttctgaccttaggcca

SEQ ID NO: 906 - DNA, 2361 bp, Homo sapiens
atggccaaaccagcacagggtgccaagtaccggggctccatccatgacttcccaggctttgaccccaaccaggatgccgaggctctgtacactgccatgaagggctttggcagtgacaaggaggccatattggacataatcacctcacggagcaacaggcagaggcaggaggtctgccagagctacaagtccctctacggcaaggacctcattgctgatttaaagtatgaattgacgggcaagtttgaacggttgattgtgggcctgatgaggccacctgcctattgtgatgccaaagaaattaaagatgccatctcgggcattggcactgatgagaagtgcctcattgagatcttggcttcccggaccaatgagcagatgcaccagctggtggcagcatacaaagatgcctacgagcgggacctggaggctgacatcatcggcgacacctctggccacttccagaagatgcttgtggtcctgctccagggaaccagggaggaggatgacgtagtgagcgaggacctggtacaacaggatgtccaggacctatacgaggcaggggaactgaaatggggaacagatgaagcccagttcatttacatcttgggaaatcgcagcaagcagcatcttcggttggtgttcgatgagtatctgaagaccacagggaagccgattgaagccagcatccgaggggagctgtctggggactttgagaagctaatgctggccgtagtgaagtgtatccggagcaccccggaatattttgctgaaaggctcttcaaggctatgaagggcctggggactcgggacaacaccctgatccgcatcatggtctcccgtagtgagttggacatgctcgacattcgggagatcttccggaccaagtatgagaagtccctctacagcatgatcaagaatgacacctctggcgagtacaagaagactctgctgaagctgtctgggggagatgatgatgctgctggccagttcttcccggaggcagcgcaggtggcctatcagatgtgggaacttagtgcagtggcccgagtagagctgaagggaactgtgcgcccagccaatgacttcaaccctgacgcagatgccaaagcgctgcggaaagccatgaagggactcgggactgacgaagacacaatcatcgatatcatcacgcaccgcagcaatgtccagcggcagcagatccggcagaccttcaagtctcactttggccgggacttaatgactgacctgaagtctgagatctctggagacctggcaaggctgattctggggctcatgatgccaccggcccattacgatgccaagcagttgaagaaggccatggagggagccggcacagatgaaaaggctcttattgaaatcctggccactcggaccaatgctgaaatccgggccatcaatgaggcctataaggaggactatcacaagtccctggaggatgctctgagctcagacacatctggccacttcaggaggatcctcatttctctggccacggggcatcgtgaggagggaggagaaaacctggaccaggcacgggaagatgcccaggtggctgctgagatcttggaaatagcagacacacccagtggagacaaaacttccttggagacacgtttcatgacgatcctgtgtacccggagctatccgcacctccggagagtcttccaggagttcatcaagatgaccaactatgacgtggagcacaccatcaagaaggagatgtctggggatgtcagggatgcatttgtggccattgttcaaagtgtcaagaacaagcctctcttctttgccgacaaactttacaaatccatgaagggtgctggcacagatgagaagactctgaccaggatcatggtatcccgcagtgagattgacctgctcaacatccggagggaattcattgagaaatatgacaagtctctccaccaagccattgagggtgacacctccggagacttcctgaaggccttgctggctctctgtggtggtgaggactagggccacagctttggcgggcacttctgccaagaaatggttatcagcaccagccgccatggccaagcctgattgttccagctccagagactaaggaaggggcaggggtggggggaggggttgggttgggctcttatcttcagtggagcttaggaaacgctcccactcccacgggccatcgagggcccagcacggctgagcggctgaaaaaccgtagccatagatcctgtccacctccactcccctctgaccctcaggctttcccagcttcctccccttgctacagcctctgccctggtttgggctatgtcagatccaaaaacatcctgaacctctgtctgt

SEQ ID NO: 907 - DNA, 4682 bp, Homo sapiens
agggccgggcttcgtgcggtggggctcgctcgcgcggcagcggtggccgaggcctcttggttctgcggcacgtgacggtcgggccgcctccgcctctctctttactgcggcgcggggcaaggtgtgcgggcgggaaggggcacgggcacccccgcggtccccgggaggctagagatcatggaagggaagtggttgctgtgtatgttactggtgcttggaactgctattgttgaggctcatgatggacatgatgatgatgtgattgatattgaggatgaccttgacgatgtcattgaagaggtagaagactcaaaaccagataccactgctcctccttcatctcccaaggttacttacaaagctccagttccaacaggggaagtatattttgctgattcttttgacagaggaactctgtcagggtggattttatccaaagccaagaaagacgataccgatgatgaaattgccaaatatgatggaaagtgggaggtagaggaaatgaaggagtcaaagcttccaggtgataaaggacttgtgttgatgtctcgggccaagcatcatgccatctctgctaaactgaacaagcccttcctgtttgacaccaagcctctcattgttcagtatgaggttaatttccaaaatggaatagaatgtggtggtgcctatgtgaaactgctttctaaaacaccagaactcaacctggatcagttccatgacaagaccccttatacgattatgtttggtccagataaatgtggagaggactataaactgcacttcatcttccgacacaaaaaccccaaaacgggtatctatgaagaaaaacatgctaagaggccagatgcagatctgaagacctattttactgataagaaaacacatctttacacactaatcttgaatccagataatagttttgaaatactggttgaccaatctgtggtgaatagtggaaatctgctcaatgacatgactcctcctgtaaatccttcacgtgaaattgaggacccagaagaccggaagcccgaggattgggatgaaagaccaaaaatcccagatccagaagctgtcaagccagatgactgggatgaagatgcccctgctaagattccagatgaagaggccacaaaacccgaaggctggttagatgatgagcctgagtacgtacctgatccagacgcagagaaacctgaggattgggatgaagacatggatggagaatgggaggctcctcagattgccaaccctagatgtgagtcagctcctggatgtggtgtctggcagcgacctgtgattgacaaccccaattataaaggcaaatggaagcctcctatgattgacaatcccagttaccagggaatctggaaacccaggaaaataccaaatccagatttctttgaagatctggaacctttcagaatgactccttttagtgctattggtttggagctgtggtccatgacctctgacattttttttgacaactttatcatttgtgctgatcgaagaatagttgatgattgggccaatgatggatggggcctgaagaaagctgctgatggggctgctgagccaggcgttgtggggcagatgatcgaggcagctgaagagcgcccgtggctgtgggtagtctatattctaactgtagcccttcctgtgttcctggttatcctcttctgctgttctggaaagaaacagaccagtggtatggagtataagaaaactgatgcacctcaaccggatgtgaaggaagaggaagaagagaaggaagaggaaaaggacaagggagatgaggaggaggaaggagaagagaaacttgaagagaaacagaaaagtgatgctgaagaagatggtggcactgtcagtcaagaggaggaagacagaaaacctaaagcagaggaggatgaaattttgaacagatcaccaagaaacagaaagccacgaagagagtgaaacaatcttaagagcttgatctgtgatttcttctccctcctcccctgcaagagtggtcctaggagaggacctggcacaccttaggttgacattcagaaaacttcaagacatcaccatcagcaggctccagttgaacactagtctgtgtaactttaaacatctagcagtaaatacttgcagttgtgatataaaggaccctgtttctgtagaaaagaaaacatttaacataatggttgtgaaatgtaacatgaagcaaactaacttttttttttttaacatctttgtttttaaaatagaatgatagaactttgccagtctttaagatcttggcttaatttaatgtattaatctgtttgtgcaaacataataccaccatttaaaaatgttagggagatgagttgcagtttttataatagattttttttaaagtttggtattgtaaaacattcacacctctgtccctcaaaattgataattacgtttaaagtgcagtcatttgtggttagaatcttgttttgtttgcttccattattgagttcctcctaaggaaattgaggagagggactgaatagaagcccaaattcatataaaagttgcgtttaagttgtattaaaaatagatatataagaaaaaattctttcacttgatgtttgttagaccagaaagtgtgtgtgttctgtagctcagttcccagacagctttttaggtagtggaggaggtggcttcatgtggcacttgggcatttatattccacttgggagggtcaggctgtggccttctggagcaggtggcttgttaaggaatgctagcagggcatggcacgtgagctccggaatagatgtcttcatcacttcttccactgtgtgttgacactgttttccttacctatttcctcagatccccagctttctcctctgctatgcattttcttcacagtgcagcttgcagtccgttgctgaaaatgattataagccctgcataatgttaagctttattgtgattacgtgtatgtttcttctttcttttaagcagacccatacctttccagggtcaaagtacagaatagaatacattgatacaaagtacagaaaaatactttgatttttatccatttcttttactctgtgtaaagacttgagaagtctaattcacaggcaaaccaatacagaattgactgcagttgaacagactagaagtatttgtgggaggagtgacatgaagcatgagttatctgattttttttgtagctgctatatattttaagccttcatttgcaattcatgtaacagttgtgtcataaattacacaataaagcagtcctgttcaaatttttttttaacgtggcttgtagaatttttaaaaaagtgatcttaggtttgttttttcatgcgggatgcagatgggtgctatcagagcctctcccacaccactatagtgtaataatgttattattactctacactgaaacgtattcagagttagatattattttagcttcagttgttctttagaggctttcaaatgtaccgatgatactgtttcttgcactgaatatataaacactccacagtgtttatattgggaagatattgggaaggaaatatatttgtaaaagatgaaggctgtatctatttttttttctttttaaagtttgttcacttaaattcttttgaggatgggatgtatttttcttgctgttcagtgctttttccttttcatctgttgttctgtggtcacagtgaccttagctacatagcagactttcccaaatgtattgattacaaataaacagttgttacttagcaagacctgaaaatatgtctgcaggtttctccttgaagcaaatgtgtgggatcattgcatttccagaaatctgcctccttcaccctccgttgacagtatatgtcatgcctcactttcttctagctgagctttaaatcattagagcttaaattgtcagatcgttcattgcctttccagggttatttagtaaagtttgttgaaaacaaaaacgccttttcttggttcttttttcagttattttgaaggtccagcatcctgattaaatgtctgacacattaatgaatgaccagcagcagctttcagctcttaaaaagacacttatattttgattttacatgctggttacctgttccattgttgtcaaatgcccactctccatcagatgtgttcctccattttcttatccacaaagtactcctcacttttcaatttgtcatgttactaaatggtgttacattaaagccctgtgttaagtgtctgcttttgactgaatttcttcatagtaaccttcagtgtgtgtgtgtgactatgttcaattagtgggttgatcttcgtataattggccactatgtgagagttcactactaggcagaaactattatggacagtgaaataatgacttttatctcaccacgtgagtttgatgcagtcttttctgtctagcccttgcctcttcctgcccatgtgattgcggtgcagtagtttctgttgtataatagtgtggacagcagctcagaaaaggagggaatgctactgataatttgtagataatattctttaagacttaggggaaccattgaactttgaaatttttattagaaaattatttgttcagaatcagactccattattttacatatacttaaatactttaggggtatttttgaaagttagcccagttttttatgtgctattaaattttt

SEQ ID NO: 908 - DNA, 1811 bp, Homo sapiens
cgggaggctagagatcatggaagggaagtggttgctgtgtatgttactggtgcttggaactgctattgttgaggctcatgatggacatgatgatgatgtgattgatattgaggatgaccttgacgatgtcattgaagaggtagaagactcaaaaccagataccactgctcctccttcatctcccaaggttacttacaaagctccagttccaacaggggaagtatattttgctgattcttttgacagaggaactctgtcagggtggattttatccaaagccaagaaagacgataccgatgatgaaattgccaaatatgatggaaagtgggaggtagaggaaatgaaggagtcaaagcttccaggtgataaaggacttgtgttgatgtctcgggccaagcatcatgccatctctgctaaactgaacaagcccttcctgtttgacaccaagcctctcattgttcagtatgaggttaatttccaaaatggaatagaatgtggtggtgcctatgtgaaactgctttctaaaacaccagaactcaacctggatcagttccatgacaagaccccttatacgattatgtttggtccagataaatgtggagaggactataaactgcacttcatcttccgacacaaaaaccccaaaacgggtatctatgaagaaaaacatgctaagaggccagatgcagatctgaagacctattttactgataagaaaacacatctttacacactaatcttgaatccagataatagttttgaaatactggttgaccaatctgtggtgaatagtggaaatctgctcaatgacatgactcctcctgtaaatccttcacgtgaaattgaggacccagaagaccggaagcccgaggattgggatgaaagaccaaaaatcccagatccagaagctgtcaagccagatgactgggatgaagatgcccctgctaagattccagatgaagaggccacaaaacccgaaggctggttagatgatgagcctgagtacgtacctgatccagacgcagagaaacctgaggattgggatgaagacatggatggagaatgggaggctcctcagattgccaaccctagatgtgagtcagctcctggatgtggtgtctggcagcgacctgtgattgacaaccccaattataaaggcaaatggaagcctcctatgattgacaatcccagttaccagggaatctggaaacccaggaaaataccaaatccagatttctttgaagatctggaacctttcagaatgactccttttagtgctattggtttggagctgtggtccatgacctctgacattttttttgacaactttatcatttgtgctgatcgaagaatagttgatgattgggccaatgatggatggggcctgaagaaagctgctgatggggctgctgagccaggcgttgtggggcagatgatcgaggcagctgaagagcgcccgtggctgtgggtagtctatattctaactgtagcccttcctgtgttcctggttatcctcttctgctgttctggaaagaaacagaccagtggtatggagtataagaaaactgatgcacctcaaccggatgtgaaggaagaggaagaagagaaggaagaggaaaaggacaagggagatgaggaggaggaaggagaagagaaacttgaagagaaacagaaaagtgatgctgaagaagatggtggcactgtcagtcaagaggaggaagacagaaaacctaaagcagaggaggatgaaattttgaacagatcaccaagaaacagaaagccacgaagagagtgaaacaatcttaagagct

SEQ ID NO: 909 - DNA, 4489 bp, Homo sapiens
cgcggcagcggtggccgaggcctcttggttctgcggcacgtgacggtcgggccgcctccgcctctctctttactgcggcgcggggcaagatcatggaagggaagtggttgctgtgtatgttactggtgcttggaactgctattgttgaggctcatgatggacatgatgatgatgtgattgatattgaggatgaccttgacgatgtcattgaagaggtagaagactcaaaaccagataccactgctcctccttcatctcccaaggttacttacaaagctccagttccaacaggggaagtatattttgctgattcttttgacagaggaactctgtcagggtggattttatccaaagccaagaaagacgataccgatgatgaaattgccaaatatgatggaaagtgggaggtagaggaaatgaaggagtcaaagcttccaggtgataaaggacttgtgttgatgtctcgggccaagcatcatgccatctctgctaaactgaacaagcccttcctgtttgacaccaagcctctcattgttcagtatgaggttaatttccaaaatggaatagaatgtggtggtgcctatgtgaaactgctttctaaaacaccagaactcaacctggatcagttccatgacaagaccccttatacgattatgtttggtccagataaatgtggagaggactataaactgcacttcatcttccgacacaaaaaccccaaaacgggtatctatgaagaaaaacatgctaagaggccagatgcagatctgaagacctattttactgataagaaaacacatctttacacactaatcttgaatccagataatagttttgaaatactggttgaccaatctgtggtgaatagtggaaatctgctcaatgacatgactcctcctgtaaatccttcacgtgaaattgaggacccagaagaccggaagcccgaggattgggatgaaagaccaaaaatcccagatccagaagctgtcaagccagatgactgggatgaagatgcccctgctaagattccagatgaagaggccacaaaacccgaaggctggttagatgatgagcctgagtacgtacctgatccagacgcagagaaacctgaggattgggatgaagacatggatggagaatgggaggctcctcagattgccaaccctagatgtgagtcagctcctggatgtggtgtctggcagcgacctgtgattgacaaccccaattataaaggcaaatggaagcctcctatgattgacaatcccagttaccagggaatctggaaacccaggaaaataccaaatccagatttctttgaagatctggaacctttcagaatgactccttttagtgctattggtttggagctgtggtccatgacctctgacattttttttgacaactttatcatttgtgctgatcgaagaatagttgatgattgggccaatgatggatggggcctgaagaaagctgctgatggggctgctgagccaggcgttgtggggcagatgatcgaggcagctgaagagcgcccgtggctgtgggtagtctatattctaactgtagcccttcctgtgttcctggttatcctcttctgctgttctggaaagaaacagaccagtggtatggagtataagaaaactgatgcacctcaaccggatgtgaaggaagaggaagaagagaaggaagaggaaaaggacaagggagatgaggaggaggaaggagaagagaaacttgaagagaaacagaaaagtgatgctgaagaagatggtggcactgtcagtcaagaggaggaagacagaaaacctaaagcagaggaggatgaaattttgaacagatcaccaagaaacagaaagccacgaagagagtgaaacaatcttaagagcttgatctgtgatttcttctccctcctcccctgcaagagtggtcctaggagaggacctggcacaccttaggttgacattcagaaaacttcaagacatcaccatcagcaggctccagttgaacactagtctgtgtaactttaaacatctagcagtaaatacttgcagttgtgatataaaggaccctgtttctgtagaaaagaaaacatttaacataatggttgtgaaatgtaacatgaagcaaactaacttttttttttttaacatctttgtttttaaaatagaatgatagaactttgccagtctttaagatcttggcttaatttaatgtattaatctgtttgtgcaaacataataccaccatttaaaaatgttagggagatgagttgcagtttttataatagattttttttaaagtttggtattgtaaaacattcacacctctgtccctcaaaattgataattacgtttaaagtgcagtcatttgtggttagaatcttgttttgtttgcttccattattgagttcctcctaaggaaattgaggagagggactgaatagaagcccaaattcatataaaagttgcgtttaagttgtattaaaaatagatatataagaaaaattcccagacagctttttaggtagtggaggaggtggcttcatgtggcacttgggcatttatattccacttgggagggtcaggctgtggccttctggagcaggtggcttgttaaggaatgctagcagggcatggcacgtgagctccggaatagatgtcttcatcacttcttccactgtgtgttgacactgttttccttacctatttcctcagatccccagctttctcctctgctatgcattttcttcacagtgcagcttgcagtccgttgctgaaaatgattataagccctgcataatgttaagctttattgtgattacgtgtatgtttcttctttcttttaagcagacccatacctttccagggtcaaagtacagaatagaatacattgatacaaagtacagaaaaatactttgatttttatccatttcttttactctgtgtaaagacttgagaagtctaattcacaggcaaaccaatacagaattgactgcagttgaacagactagaagtatttgtgggaggagtgacatgaagcatgagttatctgattttttttgtagctgctatatattttaagccttcatttgcaattcatgtaacagttgtgtcataaattacacaataaagcagtcctgttcaaatttttttttaacgtggcttgtagaatttttaaaaaagtgatcttaggtttgttttttcatgcgggatgcagatgggtgctatcagagcctctcccacaccactatagtgtaataatgttattattactctacactgaaacgtattcagagttagatattattttagcttcagttgttctttagaggctttcaaatgtaccgatgatactgtttcttgcactgaatatataaacactccacagtgtttatattgggaagatattgggaaggaaatatatttgtaaaagatgaaggctgtatctatttttttttctttttaaagtttgttcacttaaattcttttgaggatgggatgtatttttcttgctgttcagtgctttttccttttcatctgttgttctgtggtcacagtgaccttagctacatagcagactttcccaaatgtattgattacaaataaacagttgttacttagcaagacctgaaaaaatctgcctccttcaccctccgttgacagtatatgtcatgcctcactttcttctagctgagctttaaatcattagagcttaaattgtcagatcgttcattgcctttccagggttatttagtaaagtttgttgaaaacaaaaacgccttttcttggttcttttttcagttattttgaaggtccagcatcctgattaaatgtctgacacattaatgaatgaccagcagcagctttcagctcttaaaaagacacttatattttgattttacatgctggttacctgttccattgttgtcaaatgcccactctccatcagatgtgttcctccattttcttatccacaaagtactcctcacttttcaatttgtcatgttactaaatggtgttacattaaagccctgtgttaagtgtctgcttttgactgaatttcttcatagtaaccttcagtgtgtgtgtgtgactatgttcaattagtgggttgatcttcgtataattggccactatgtgagagttcactactaggcagaaactattatggacagtgaaataatgacttttatctcaccacgtgagtttgatgcagtcttttctgtctagcccttgcctcttcctgcccatgtgattgcggtgcagtagtttctgttgtataatagtgtggacagcagctcagaaaaggagggaatgctactgataatttgtagataatattctttaagacttaggggaaccattgaactttgaaatttttattagaaaattatttgttcagaatcagactccattattttacatatacttaaatactttaggggtatttttgaaagttagcccagttttttatgtgctattaaattttt

SEQ ID NO: 910 - DNA, 1986 bp, Homo sapiens
gcgccggagcccaaaaacaaggactgcgcacgcgcggcggcaaggcccgggcattttgctgcgtcaccagccgccgcccggcctcaccacccctcgtttgcacgcacgcacgttcattctccgtcctcgcgccccttttcctacactttcctcttctccccgaccggaggagccgctctttccgcgcggtgcattctggggcccgaggtcgagcccgccgctgccgccgtcgcctgagggaagcgagaagaggccgcgaccggagagaaaaagcggagtcgccaccggagagaagtcgactccctagcagcagccgccgccagagaggcccgcccaccagttcgcccgtccccctgccccgttcacaatgcagcctgcttctgcaaagtggtacgatcgaagggactatgtcttcattgaattttgtgttgaagacagtaaggatgttaatgtaaattttgaaaaatccaaacttacattcagttgtctcggaggaagtgataattttaagcatttaaatgaaattgatctttttcactgtattgatccaaatgattccaagcataaaagaacggacagatcaattttatgttgtttacgaaaaggagaatctggccagtcatggccaaggttaacaaaagaaagggcaaagcttaattggcttagtgtcgacttcaataattggaaagactgggaagatgattcagatgaagacatgtctaattttgatcgtttctctgagatgatgaacaacatgggtggtgatgaggatgtagatttaccagaagtagatggagcagatgatgattcacaagacagtgatgatgaaaaaatgccagatctggagtaaggaatattgtcatcacctggattttgagaaagaaaaataacttctctgcaagatttcataattgagagaattcctgagttgatagctctaaaggcagatatgctgtatttgcctactttaacccatttttcaacctgtttgttttttaaaaggcttcactaagggttgatatgtaccattgtatggggcaattttaagtcagctaaggcaataaccttatgcatgaacatttcccagactttcatgaagctgttgaggtcctaggcaattaatgcagcagttgcgataaataaaaacatctcacctaagtctccttttcttcataacatagatactgacatgataggaagctctcagcttagggaaagagaataaattttagattatagaacatggattcaaaagtgactggaacaaattggctgacaccttactggtaacctgctattcttctggtgttatccttcaggattgttccactaaaatttatttttcaaaaaatttacttcacattattctatgtaagtgatgacttgtcagtgttccaggtgtatcttagctaaaactagagaatgccctaacttagatggtttttgaagcctatacaattggtattgtttgacccttaagcttttacatctcttagcatggaggacgaagaaagctgtacattgttgcttgagagtctgtacatttagtccagatttgtatttgcactgtcagtatggcaaatgagtgaaaaatgtttaatacactattggattttttatttcctttttttgattcagcttatacccgggctgaaaacctcaatttatgttcatgacagtggggatttttttaaatgtctacattctttctaataaactgttggaagacttcttggctgtccttttaagtgtctggcttactgtaatttttatgtatttaccatttactggaatggagtttatttgaggaagaatttgggattattcctctgtttgaaaaaagaggcttgctgtaatgtcacaggaaaccttttaaaagtggatctgtaatagcatattgtagatgcactttgcagcagttggaaaagaaagtgttgtgtgatttgattgaaataaaactaaatgtgttgtcctcctaaatctttg

SEQ ID NO: 911 - DNA, 782 bp, Homo sapiens
ggattcgggctacactttcctcttctccccgaccggagagccgctctttccgcgcggtgcattctggggcccgaggtcgagcccgccgctgccgccgtcgcctgagggaagcgagaagaggccgcgaccgagagaaaaagcggagtcgcaccggagagaagtcgactccctagcagcagccgccgccagagagcccgcccaccagttcgcccgtccccctgccccgttcacaatgcagcctgcttctgcaaagtggtacgatcgaagggactatgtcttcattgaattttgtgttgaagacagtaaggatgttaatgtaaattttgaaaaatccaaacttacattcagttgtctcggaggaagtgataattttaagcatttaaatgaaattgatctttttcactgtattgatccaaatgattccaagcataaaagaacggacagatcaattttatgttgtttacgaaaaggagaatctggccagtcatggccaaggttaacaaaagaaagggcaaagcttaattggcttagtgtcgacttcaataattggaaagactgggaagatgattcagatgaagacatgtctaattttgatcgtttctctgagatgatgaacaacatgggtggtgatgaggatgtagatttaccagaagtagatggagcagatgatgattcacaagacagtgatgatgaaaaaatgccagatctggagtaaggaatattgtcatcacctggattttgagaaagaaaaataacttctctgcaagatttcataattgaga

SEQ ID NO: 912 - DNA, 2483 bp, Homo sapiens
ccggcctcaccacccctcgtttgcacgcacgcacgttcattctccgtcctcgcgccccttttcctacactttcctcttctccccgaccggaggagccgctctttccgcgcggtgcattctggggcccgaggtcgagcccaagcggagtcgccaccggagagaagtcgactccctagcagcagccgccgccagagaggcccgcccaccagttcgcccgtccccctgccccgttcacaatgtgagtgcgacaccccgccgagggaaggtcgccgagtgaggccgaggccgcgttgggggctccctggaagcggccccctagcctttctcgcatcggtggtggcagtcgttcctgcctgggggcgggaggtccaggatccttgttccggttaccgttggcgggtggaggacatttttcctccagatgtctgcttcccccacccctgaaccgttccttggcttccccatgccggaaatcctacttttacccctttggctgtctgggctactcgcctctttcggtaacttcaccctaggccttaagctcccggtagctgctcgccatgcggcgccctgaagcgtgaaccttcgtgggtcgcctctcggctgcttgggcgctccggttctgttgctttgtggtcccggggccaggccctgagtcgagtgcacctgtggtgggtgccgccaggtgcctggcggagctcctgggagagccccacgcggacctcgccgtgagctgcaggtactgctaggcaactagaaggaagccatgcccacgccgcaacatacttccctctccagtgtctgggtttcttgagtgtgggtacttccagtccgcctcctaactccagtctcttgaaaacacgggaggttgccaaaactcagccgcttccctggcagcgaggaggagttaccattgagcaggtagttccgcacgtgtcgactttggaaagatacggacattttctgtgtttcatgttctacttgaggcagcctgcttctgcaaagtggtacgatcgaagggactatgtcttcattgaattttgtgttgaagacagtaaggatgttaatgtaaattttgaaaaatccaaacttacattcagttgtctcggaggaagtgataattttaagcatttaaatgaaattgatctttttcactgtattgatccaaatgattccaagcataaaagaacggacagatcaattttatgttgtttacgaaaaggagaatctggccagtcatggccaaggttaacaaaagaaagggcaaagcttaattggcttagtgtcgacttcaataattggaaagactgggaagatgattcagatgaagacatgtctaattttgatcgtttctctgagatgatgaacaacatgggtggtgatgaggatgtagatttaccagaagtagatggagcagatgatgattcacaagacagtgatgatgaaaaaatgccagatctggagtaaggaatattgtcatcacctggattttgagaaagaaaaataacttctctgcaagatttcataattgagagaattcctgagttgatagctctaaaggcagatatgctgtatttgcctactttaacccatttttcaacctgtttgtttttcagctaaggcaataaccttatgcatgaacatttcccagactttcatgaagctgttgaggtcctaggcaattaatgcagcagttgcgataaataaaaacatctcacctaagtctccttttcttcataacatagatactgacatgataggaagctctcagcttagggaaagagaataaattttagattatagaacatggattcaaaagtgactggaacaaattggctgacaccttactggtaacctgctattcttctggtgttatccttcaggattgttccactaaaatttatttttcaaaaaatttacttcacattattctatgtaagtgatgacttgtcagtgttccaggtgtatcttagctaaaactagagaatgccctaacttagatggtttttgaagcctatacaattggtattgtttgacccttaagcttttacatctcttagcatggaggacgaagaaagctgtacattgttgcttgagagtctgtacatttagtccagatttgtatttgcactgtcagtatggcaaatgagtgaaaaatgtttaatacactattggattttttatttcctttttttgattcagcttatacccgggctgaaaacctcaatttatgttcatgacagtggggatttttttaaatgtctacattctttctaataaactgttggaagacttcttggctgtccttttaagtgtctggcttactgtaatttttatgtatttaccatttactggaatggagtttatttgaggaagaatttgggattattcctctgtttgaaaaaagaggcttgctgtaatgtcacaggaaaccttttaaaagtggatctgtaatagcatattgtagatgcactttgcagcag

SEQ ID NO: 913 - DNA, 1759 bp, Homo sapiens
agcccgccgctgccgccgtcgcctgagggaagcgagaagaggccgcgaccggagagaaaaagcggagtcgccaccggagagaacagccgccgccagagaggcccgcccaccagttcgcccgtccccctgccccgttcacaatgcagcctgcttctgcaaagtggtacgatcgaagggactatgtcttcattgaattttgtgttgaagacagtaaggatgttaatgtaaattttgaaaaatccaaacttacattcagttgtctcggaggaagtgataattttaagcatttaaatgaaattgatctttttcactgtattgatccaaatgattccaagcataaaagaacggacagatcaattttatgttgtttacgaaaaggagaatctggccagtcatggccaaggttaacaaaagaaagggcaaagcttaattggcttagtgtcgacttcaataattggaaagactgggaagatgattcagatgaagacatgtctaattttgatcgtttctctgagatgatgaacaacatgggtggtgatgaggatgtagatttaccagaagtagatggagcagatgatgattcacaagacagtgatgatgaaaaaatgccagatctggagtaaggaatattgtcatcacctggattttgagaaagaaaaataacttctctgcaagatttcataattgagagaattcctgagttgatagctctaaaggcagatatgctgtatttgcctactttaacccatttttcaacctgtttgttttttaaaaggcttcactaagggttgatatgtaccattgtatggggcaattttaagtcagctaaggcaataaccttatgcatgaacatttcccagactttcatgaagctgttgaggtcctaggcaattaatgcagcagttgcgataaataaaaacatctcacctaagtctccttttcttcataacatagatactgacatgataggaagctctcagcttagggaaagagaataaattttagattatagaacatggattcaaaagtgactggaacaaattggctgacaccttactggtaacctgctattcttctggtgttatccttcaggattgttccactaaaatttatttttcaaaaaatttacttcacattattctatgtaagtgatgacttgtcagtgttccaggtgtatcttagctaaaactagagaatgccctaacttagatggtttttgaagcctatacaattggtattgtttgacccttaagcttttacatctcttagcatggaggacgaagaaagctgtacattgttgcttgagagtctgtacatttagtccagatttgtatttgcactgtcagtatggcaaatgagtgaaaaatgtttaatacactattggattttttatttcctttttttgattcagcttatacccgggctgaaaacctcaatttatgttcatgacagtggggatttttttaaatgtctacattctttctaataaactgttggaagacttcttggctgtccttttaagtgtctggcttactgtaatttttatgtatttaccatttactggaatggagtttatttgaggaagaatttgggattattcctctgtttgaaaaaagaggcttgctgtaatgtcacaggaaaccttttaaaagtggatctgtaatagcatattgtagatgcactttgcagcagttggaaaagaaagtgttgtgtgatttgattgaaataaaactaaatgtgttgtcctcctaaatctttg

SEQ ID NO: 914 - DNA, 1735 bp, Homo sapiens
ccggcctcaccacccctcgtttgcacgcacgcacgttcattctccgtcctcgcgccccttttcctacactttcctcttctccccgaccggaggagccgctctttccgcgcggtgcattctggggcccgaggtcgagcccaagcggagtcgccaccggagagaagtcgactccctagcagcagccgccgccagagaggcccgcccaccagttcgcccgtccccctgccccgttcacaatgcagcctgcttctgcaaagtggtacgatcgaagggactatgtcttcattgaattttgtgttgaagacagtaaggatgttaatgtaaattttgaaaaatccaaacttacattcagttgtctcggaggaagtgataattttaagcatttaaatgaaattgatctttttcactgtattgatccaaatgattccaagcataaaagaacggacagatcaattttatgttgtttacgaaaaggagaatctggccagtcatggccaaggttaacaaaagaaagggcaaagcttaattggcttagtgtcgacttcaataattggaaagactgggaagatgattcagatgaagacatgtctaattttgatcgtttctctgagatgatgaacaacatgggtggtgatgaggatgtagatttaccagaagtagatggagcagatgatgattcacaagacagtgatgatgaaaaaatgccagatctggagtaaggaatattgtcatcacctggattttgagaaagaaaaataacttctctgcaagatttcataattgagagaattcctgagttgatagctctaaaggcagatatgctgtatttgcctactttaacccatttttcaacctgtttgtttttcagctaaggcaataaccttatgcatgaacatttcccagactttcatgaagctgttgaggtcctaggcaattaatgcagcagttgcgataaataaaaacatctcacctaagtctccttttcttcataacatagatactgacatgataggaagctctcagcttagggaaagagaataaattttagattatagaacatggattcaaaagtgactggaacaaattggctgacaccttactggtaacctgctattcttctggtgttatccttcaggattgttccactaaaatttatttttcaaaaaatttacttcacattattctatgtaagtgatgacttgtcagtgttccaggtgtatcttagctaaaactagagaatgccctaacttagatggtttttgaagcctatacaattggtattgtttgacccttaagcttttacatctcttagcatggaggacgaagaaagctgtacattgttgcttgagagtctgtacatttagtccagatttgtatttgcactgtcagtatggcaaatgagtgaaaaatgtttaatacactattggattttttatttcctttttttgattcagcttatacccgggctgaaaacctcaatttatgttcatgacagtggggatttttttaaatgtctacattctttctaataaactgttggaagacttcttggctgtccttttaagtgtctggcttactgtaatttttatgtatttaccatttactggaatggagtttatttgaggaagaatttgggattattcctctgtttgaaaaaagaggcttgctgtaatgtcacaggaaaccttttaaaagtggatctgtaatagcatattgtagatgcactttgcagcag

SEQ ID NO: 915 - DNA, 922 bp, Homo sapiens
gaggcattcattctttcctttctgtgggtgtggggaggggaccacagggcacataccccaccctgggatccagctgagcaggggggtcagagatgacagctcttccggctcacaggccaccggcccacatacagggcaatcagaagaaagaaacagcacaaggaaggcacagagggagtcgttgtccctgccagaggcccagcagccaccacagcgcctgcttcctcggccctgaaatcatgcccctaggtctcctgtggctgggcctagccctgttgggggctctgcatgcccaggcccaggactccacctcagacctgatcccagccccacctctgagcaaggtccctctgcagcagaacttccaggacaaccaattccaggggaagtggtatgtggtaggcctggcagggaatgcaattctcagagaagacaaagacccgcaaaagatgtatgccaccatctatgagctgaaagaagacaagagctacaatgtcacctccgtcctgtttaggaaaaagaagtgtgactactggatcaggacttttgttccaggttgccagcccggcgagttcacgctgggcaacattaagagttaccctggattaacgagttacctcgtccgagtggtgagcaccaactacaaccagcatgctatggtgttcttcaagaaagtttctcaaaacagggagtacttcaagatcaccctctacgggagaaccaaggagctgacttcggaactaaaggagaacttcatccgcttctccaaatctctgggcctccctgaaaaccacatcgtcttccctgtcccaatcgaccagtgtatcgacggctgagtgcacaggtgcctcccatctgccgcaccagcccgaacaccattgagggagctgggagaccctccccacagtgccacccatgcagc

SEQ ID NO: 916 - DNA, 813 bp, Homo sapiens
actcgccacctcctcttccacccctgccaggcccagcagccaccacagcgcctgcttcctcggccctgaaatcatgcccctaggtctcctgtggctgggcctagccctgttgggggctctgcatgcccaggcccaggactccacctcagacctgatcccagccccacctctgagcaaggtccctctgcagcagaacttccaggacaaccaattccaggggaagtggtatgtggtaggcctggcagggaatgcaattctcagagaagacaaagacccgcaaaagatgtatgccaccatctatgagctgaaagaagacaagagctacaatgtcacctccgtcctgtttaggaaaaagaagtgtgactactggatcaggacttttgttccaggttgccagcccggcgagttcacgctgggcaacattaagagttaccctggattaacgagttacctcgtccgagtggtgagcaccaactacaaccagcatgctatggtgttcttcaagaaagtttctcaaaacagggagtacttcaagatcaccctctacgggagaaccaaggagctgacttcggaactaaaggagaacttcatccgcttctccaaatctctgggcctccctgaaaaccacatcgtcttccctgtcccaatcgaccagtgtatcgacggctgaggtgccgccagctgccgcaccagcccgaacaccattgagggagctgggagaccctccccacagtgccacccatgcagctgctccccaggccaccccgctgatggagccccaccttgtctgctaaataaacatgtgccctcagg

SEQ ID NO: 917 - DNA, 992 bp, Homo sapiens
gcccagcagccaccacagcgcctgcttcctcggccctgaaatcatgcccctaggtctcctgtggctgggcctagccctgttgggggctctgcatgcccaggcccaggactccacctcagacctgatcccagccccacctctgagcaaggtccctctgcagcagaacttccaggacaaccaattccaggggaagtggtatgtggtaggcctggcagggaatgcaattctcagagaagacaaagacccgcaaaagatgtatgccaccatctatgagctgaaagaagacaagagctacaatgtcacctccgtcctgtttaggaaaaagaagtgtgactactggatcaggacttttgttccaggttgccagcccggcgagttcacgctgggcaacattaagagttaccctggattaacgagttacctcgtccgagtggtgagcaccaactacaaccagcatgctatggtgttcttcaagaaagtttctcaaaacagggagtacttcaagatcaccctctacgggagaaccaaggagctgacttcggaactaaaggagaacttcatccgcttctccaaatctctgggcctccctgaaaaccacatcgtcttccctgtcccaatcggtaatggccagtctggatgaggggacggggacatggggactgttcaggcaggatgcttccctaccagggatcagggagaggagggactccgtcctcagcttcagtcactggagcagtggatggtccaggagctccttggaagccactctgggcccaggaagactgtgccccaccccagggtctatgggactcccagggacccaggccgcaagtgctctttcctggcagtttagcccgggtctgcccagacaaggatttcaggcccaggcctgagtatccatttctcagtctcactggcctgacacctctggccaccctcccaggcccccttgttctgggccatctcccccgaccctcccaggcctcgtcacc

SEQ ID NO: 918 - DNA, 845 bp, Homo sapiens
caggtgagcctctcactcgccacctcctcttccacccctgccaggcccagcagccaccacagcgcctgcttcctcggccctgaaatcatgcccctaggtctcctgtggctgggcctagccctgttgggggctctgcatgcccaggcccaggactccacctcagacctgatcccagccccacctctgagcaaggtccctctgcagcagaacttccaggacaaccaattccaggggaagtggtatgtggtaggcctggcagggaatgcaattctcagagaagacaaagacccgcaaaagatgtatgccaccatctatgagctgaaagaagacaagagctacaatgtcacctccgtcctgtttaggaaaaagaagtgtgactactggatcaggacttttgttccaggttgccagcccggcgagttcacgctgggcaacattaagagttaccctggattaacgagttacctcgtccgagtggtgagcaccaactacaaccagcatgctatggtgttcttcaagaaagtttctcaaaacagggagtacttcaagatcaccctctacgggagaaccaaggagctgacttcggaactaaaggagaacttcatccgcttctccaaatctctgggcctccctgaaaaccacatcgtcttccctgtcccaatcgaccagtgtatcgacggctgagtgcacaggtgccgccagctgccgcaccagcccgaacaccattgagggagctgggagaccctccccacagtgccacccatgcagctgctccccaggccaccccgctgatggagccccaccttgtctgctaaataaacatgtgccctcaggccaaaaagaaa

SEQ ID NO: 919 - DNA, 1188 bp, Homo sapiens
gaggcattcattctttcctttctgtgggtgtggggaggggaccacagggcacataccccaccctgggatccagctgagcaggggggtcagagatgacagctcttccggctcacaggccaccggcccacatacagggcaatcagaagaaagaaacagcacaaggaaggcacagagggagtcgttgtccctgccagaggcccagcagccaccacagcgcctgcttcctcggccctgaaatcatgcccctaggtctcctgtggctgggcctagccctgttgggggctctgcatgcccaggcccaggactccacctcagacctgatcccagccccacctctgagcaaggtccctctgcagcagaacttccaggacaaccaattccaggggaagtggtatgtggtaggcctggcagggaatgcaattctcagagaagacaaagacccgcaaaagatgtatgccaccatctatgagctgaaagaagacaagagctacaatgtcacctccgtcctgtttaggaaaaagaagtgtgactactggatcaggacttttgttccaggttgccagcccggcgagttcacgctgggcaacattaagagttaccctggattaacgagttacctcgtccgagtggtgagcaccaactacaaccagcatgctatggtgttcttcaagaaagtttctcaaaacagggagtacttcaagatcaccctctacgggagaaccaaggagctgacttcggaactaaaggagaacttcatccgcttctccaaatctctgggcctccctgaaaaccacatcgtcttccctgtcccaatcggtaatggccagtctggatgaggggacggggacatggggactgttcaggcaggatgcttccctaccagggatcagggagaggagggactccgtcctcagcttcagtcactggagcagtggatggtccaggagctccttggaagccactctgggcccaggaagactgtgccccaccccagggtctatgggactcccagggacccaggccgcaagtgctctttcctggcagtttagcccgggtctgcccagacaaggatttcaggcccaggcctgagtatccatttctcagtctcactggcctgacacctctggccaccctcccaggcccccttgttctgggccatctcccccgaccctcccaggcctcgtcacc

SEQ ID NO: 920 - DNA, 822 bp, Homo sapiens
tcttccacccctgccaggcccagcagccaccacagcgcctgcttcctcggccctgaaatcatgcccctaggtctcctgtggctgggcctagccctgttgggggctctgcatgcccaggcccaggactccacctcagacctgatcccagccccacctctgagcaaggtccctctgcagcagaacttccaggacaaccaattccaggggaagtggtatgtggtaggcctggcagggaatgcaattctcagagaagacaaagacccgcaaaagatgtatgccaccatctatgagctgaaagaagacaagagctacaatgtcacctccgtcctgtttaggaaaaagaagtgtgactactggatcaggacttttgttccaggttgccagcccggcgagttcacgctgggcaacattaagagttaccctggattaacgagttacctcgtccgagtggtgagcaccaactacaaccagcatgctatggtgttcttcaagaaagtttctcaaaacagggagtacttcaagatcaccctctacgggagaaccaaggagctgacttcggaactaaaggagaacttcatccgcttctccaaatctctgggcctccctgaaaaccacatcgtcttccctgtcccaatcgaccagtgtatcgacggctgagtgcacaggtgccgccagctgccgcaccagcccgaacaccattgagggagctgggagaccctccccacagtgccacccatgcagctgctccccaggccaccccgctgatggagccccaccttgtctgctaaataaacatgtgccctcaaaaaaaaaaaaaaaaaa

SEQ ID NO: 921 - DNA, 2498 bp, Homo sapiens
cgccgcgcttcctcctgaaggtgactgcgcccgcggggacgcagggggcggggcccgggtcgcccggagccgggattgggcagagggcggggcggcggagggattgcggcggcccgcagcgggataaccttgaggctgaggcagtggctccttgcacagcagctgcacgcgccgtggctccggatctcttcgtctttgcagcgtagcccgagtcggtcagcgccggaggacctcagcagccatgtcgaagccccatagtgaagccgggactgccttcattcagacccagcagctgcacgcagccatggctgacacattcctggagcacatgtgccgcctggacattgattcaccacccatcacagcccggaacactggcatcatctgtaccattggcccagcttcccgatcagtggagacgttgaaggagatgattaagtctggaatgaatgtggctcgtctgaacttctctcatggaactcatgagtaccatgcggagaccatcaagaatgtgcgcacagccacggaaagctttgcttctgaccccatcctctaccggcccgttgctgtggctctagacactaaaggacctgagatccgaactgggctcatcaagggcagcggcactgcagaggtggagctgaagaagggagccactctcaaaatcacgctggataacgcctacatggaaaagtgtgacgagaacatcctgtggctggactacaagaacatctgcaaggtggtggaagtgggcagcaagatctacgtggatgatgggcttatttctctccaggtgaagcagaaaggtgccgacttcctggtgacggaggtggaaaatggtggctccttgggcagcaagaagggtgtgaaccttcctggggctgctgtggacttgcctgctgtgtcggagaaggacatccaggatctgaagtttggggtcgagcaggatgttgatatggtgtttgcgtcattcatccgcaaggcatctgatgtccatgaagttaggaaggtcctgggagagaagggaaagaacatcaagattatcagcaaaatcgagaatcatgagggggttcggaggtttgatgaaatcctggaggccagtgatgggatcatggtggctcgtggtgatctaggcattgagattcctgcagagaaggtcttccttgctcagaagatgatgattggacggtgcaaccgagctgggaagcctgtcatctgtgctactcagatgctggagagcatgatcaagaagccccgccccactcgggctgaaggcagtgatgtggccaatgcagtcctggatggagccgactgcatcatgctgtctggagaaacagccaaaggggactatcctctggaggctgtgcgcatgcagcacctgatagctcgtgaggctgaggcagccatgttccaccgcaagctgtttgaagaacttgtgcgagcctcaagtcactccacagacctcatggaagccatggccatgggcagcgtggaggcttcttataagtgtttagcagcagctttgatagttctgacggagtctggcaggtctgctcaccaggtggccagataccgcccacgtgcccccatcattgctgtgacccggaatccccagacagctcgtcaggcccacctgtaccgtggcatcttccctgtgctgtgcaaggacccagtccaggaggcctgggctgaggacgtggacctccgggtgaactttgccatgaatgttggcaaggcccgaggcttcttcaagaagggagatgtggtcattgtgctgaccggatggcgccctggctccggcttcaccaacaccatgcgtgttgttcctgtgccgtgatggaccccagagcccctcctccagcccctgtcccacccccttcccccagcccatccattaggccagcaacgcttgtagaactcactctgggctgtaacgtggcactggtaggttgggacaccagggaagaagatcaacgcctcactgaaacatggctgtgtttgcagcctgctctagtgggacagcccagagcctggctgcccatcatgtggccccacccaatcaagggaagaaggaggaatgctggactggaggcccctggagccagatggcaagagggtgacagcttcctttcctgtgtgtactctgtccagttcctttagaaaaaatggatgcccagaggactcccaaccctggcttggggtcaagaaacagccagcaagagttaggggccttagggcactgggctgttgttccattgaagccgactctggccctggcccttacttgcttctctagctctctaggcctctccagtttgcacctgtccccaccctccactcagctgtcctgcagcaaacactccaccctccaccttccattttcccccactactgcagcacctccaggcctgttgctatagagcctacctgtatgtcaataaacaacagctgaagcaccaaaaaaaaaaaaaaaaaaaaaaaaaaaaaaaaaaaaaaaa

SEQ ID NO: 922 - DNA, 2490 bp, Homo sapiens
tcgtctttgcagcgtagcccgagtcggtcagcgccggaggtgagcggtgcaggaggctacgccatcagtccccaccaagggccagtcgcccggctagtgcggaatcccggcgcgccggccggccccgggcacgcaggcagggcggcgcaggatccagggcgtctgggatgcagtggagctcagagagaggagaacggctcctcacgcctggggcctgctcttcagaagtccccagcgccgttccttccagatcaggcgggacctcagcagccatgtcgaagccccatagtgaagccgggactgccttcattcagacccagcagctgcacgcagccatggctgacacattcctggagcacatgtgccgcctggacattgattcaccacccatcacagcccggaacactggcatcatctgtaccattggcccagcttcccgatcagtggagacgttgaaggagatgattaagtctggaatgaatgtggctcgtctgaacttctctcatggaactcatgagtaccatgcggagaccatcaagaatgtgcgcacagccacggaaagctttgcttctgaccccatcctctaccggcccgttgctgtggctctagacactaaaggacctgagatccgaactgggctcatcaagggcagcggcactgcagaggtggagctgaagaagggagccactctcaaaatcacgctggataacgcctacatggaaaagtgtgacgagaacatcctgtggctggactacaagaacatctgcaaggtggtggaagtgggcagcaagatctacgtggatgatgggcttatttctctccaggtgaagcagaaaggtgccgacttcctggtgacggaggtggaaaatggtggctccttgggcagcaagaagggtgtgaaccttcctggggctgctgtggacttgcctgctgtgtcggagaaggacatccaggatctgaagtttggggtcgagcaggatgttgatatggtgtttgcgtcattcatccgcaaggcatctgatgtccatgaagttaggaaggtcctgggagagaagggaaagaacatcaagattatcagcaaaatcgagaatcatgagggggttcggaggtttgatgaaatcctggaggccagtgatgggatcatggtggctcgtggtgatctaggcattgagattcctgcagagaaggtcttccttgctcagaagatgatgattggacggtgcaaccgagctgggaagcctgtcatctgtgctactcagatgctggagagcatgatcaagaagccccgccccactcgggctgaaggcagtgatgtggccaatgcagtcctggatggagccgactgcatcatgctgtctggagaaacagccaaaggggactatcctctggaggctgtgcgcatgcagcacctgatagctcgtgaggctgaggcagccatgttccaccgcaagctgtttgaagaacttgtgcgagcctcaagtcactccacagacctcatggaagccatggccatgggcagcgtggaggcttcttataagtgtttagcagcagctttgatagttctgacggagtctggcaggtctgctcaccaggtggccagataccgcccacgtgcccccatcattgctgtgacccggaatccccagacagctcgtcaggcccacctgtaccgtggcatcttccctgtgctgtgcaaggacccagtccaggaggcctgggctgaggacgtggacctccgggtgaactttgccatgaatgttggcaaggcccgaggcttcttcaagaagggagatgtggtcattgtgctgaccggatggcgccctggctccggcttcaccaacaccatgcgtgttgttcctgtgccgtgatggaccccagagcccctcctccagcccctgtcccacccccttcccccagcccatccattaggccagcaacgcttgtagaactcactctgggctgtaacgtggcactggtaggttgggacaccagggaagaagatcaacgcctcactgaaacatggctgtgtttgcagcctgctctagtgggacagcccagagcctggctgcccatcatgtggccccacccaatcaagggaagaaggaggaatgctggactggaggcccctggagccagatggcaagagggtgacagcttcctttcctgtgtgtactctgtccagttcctttagaaaaaatggatgcccagaggactcccaaccctggcttggggtcaagaaacagccagcaagagttaggggccttagggcactgggctgttgttccattgaagccgactctggccctggcccttacttgcttctctagctctctaggcctctccagtttgcacctgtccccaccctccactcagctgtcctgcagcaaacactccaccctccaccttccattttcccccactactgcagcacctccaggcctgttgctatagagcctacctgtatgtcaataaacaacagctgaagcacct

SEQ ID NO: 923 - DNA, 2498 bp, Homo sapiens
ccaccgaaagggcaacctgcccgcgcgttccgccgccgccgccgcgcttcctcctgaaggtgactgcgcccgcggggacgcagggggcggggcccgggtcgcccggagccgggattgggcagagggcggggcggcggagggattgcggcggcccgcagcgggataaccttgaggctgaggcagtggctccttgcacagcagctgcacgcgccgtggctccggatctcttcgtctttgcagcgtagcccgagtcggtcagcgccggaggacctcagcagccatgtcgaagccccatagtgaagccgggactgccttcattcagacccagcagctgcacgcagccatggctgacacattcctggagcacatgtgccgcctggacattgattcaccacccatcacagcccggaacactggcatcatctgtaccattggcccagcttcccgatcagtggagacgttgaaggagatgattaagtctggaatgaatgtggctcgtctgaacttctctcatggaactcatgagtaccatgcggagaccatcaagaatgtgcgcacagccacggaaagctttgcttctgaccccatcctctaccggcccgttgctgtggctctagacactaaaggacctgagatccgaactgggctcatcaagggcagcggcactgcagaggtggagctgaagaagggagccactctcaaaatcacgctggataacgcctacatggaaaagtgtgacgagaacatcctgtggctggactacaagaacatctgcaaggtggtggaagtgggcagcaagatctacgtggatgatgggcttatttctctccaggtgaagcagaaaggtgccgacttcctggtgacggaggtggaaaatggtggctccttgggcagcaagaagggtgtgaaccttcctggggctgctgtggacttgcctgctgtgtcggagaaggacatccaggatctgaagtttggggtcgagcaggatgttgatatggtgtttgcgtcattcatccgcaaggcatctgatgtccatgaagttaggaaggtcctgggagagaagggaaagaacatcaagattatcagcaaaatcgagaatcatgagggggttcggaggtttgatgaaatcctggaggccagtgatgggatcatggtggctcgtggtgatctaggcattgagattcctgcagagaaggtcttccttgctcagaagatgatgattggacggtgcaaccgagctgggaagcctgtcatctgtgctactcagatgctggagagcatgatcaagaagccccgccccactcgggctgaaggcagtgatgtggccaatgcagtcctggatggagccgactgcatcatgctgtctggagaaacagccaaaggggactatcctctggaggctgtgcgcatgcagcacctgattgcccgtgaggcagaggctgccatctaccacttgcaattatttgaggaactccgccgcctggcgcccattaccagcgaccccacagaagccaccgccgtgggtgccgtggaggcctccttcaagtgctgcagtggggccataatcgtcctcaccaagtctggcaggtctgctcaccaggtggccagataccgcccacgtgcccccatcattgctgtgacccggaatccccagacagctcgtcaggcccacctgtaccgtggcatcttccctgtgctgtgcaaggacccagtccaggaggcctgggctgaggacgtggacctccgggtgaactttgccatgaatgttggcaaggcccgaggcttcttcaagaagggagatgtggtcattgtgctgaccggatggcgccctggctccggcttcaccaacaccatgcgtgttgttcctgtgccgtgatggaccccagagcccctcctccagcccctgtcccacccccttcccccagcccatccattaggccagcaacgcttgtagaactcactctgggctgtaacgtggcactggtaggttgggacaccagggaagaagatcaacgcctcactgaaacatggctgtgtttgcagcctgctctagtgggacagcccagagcctggctgcccatcatgtggccccacccaatcaagggaagaaggaggaatgctggactggaggcccctggagccagatggcaagagggtgacagcttcctttcctgtgtgtactctgtccagttcctttagaaaaaatggatgcccagaggactcccaaccctggcttggggtcaagaaacagccagcaagagttaggggccttagggcactgggctgttgttccattgaagccgactctggccctggcccttacttgcttctctagctctctaggcctctccagtttgcacctgtccccaccctccactcagctgtcctgcagcaaacactccaccctccaccttccattttcccccactactgcagcacctccaggcctgttgctatagagcctacctgtatgtcaataaacaacagctgaagcacct

SEQ ID NO: 924 - DNA, 2392 bp, Homo sapiens
agcgggataaccttgaggctgaggcagtggctccttgcacagcagctgcacgcgccgtggctccggatctcttcgtctttgcagcgtagcccgagtcggtcagcgccggagatgactcaacctttcaattattctgcttttgagagaattatcttcgctgggacctcagcagccatgtcgaagccccatagtgaagccgggactgccttcattcagacccagcagctgcacgcagccatggctgacacattcctggagcacatgtgccgcctggacattgattcaccacccatcacagcccggaacactggcatcatctgtaccattggcccagcttcccgatcagtggagacgttgaaggagatgattaagtctggaatgaatgtggctcgtctgaacttctctcatggaactcatgagtaccatgcggagaccatcaagaatgtgcgcacagccacggaaagctttgcttctgaccccatcctctaccggcccgttgctgtggctctagacactaaaggacctgagatccgaactgggctcatcaagggcagcggcactgcagaggtggagctgaagaagggagccactctcaaaatcacgctggataacgcctacatggaaaagtgtgacgagaacatcctgtggctggactacaagaacatctgcaaggtggtggaagtgggcagcaagatctacgtggatgatgggcttatttctctccaggtgaagcagaaaggtgccgacttcctggtgacggaggtggaaaatggtggctccttgggcagcaagaagggtgtgaaccttcctggggctgctgtggacttgcctgctgtgtcggagaaggacatccaggatctgaagtttggggtcgagcaggatgttgatatggtgtttgcgtcattcatccgcaaggcatctgatgtccatgaagttaggaaggtcctgggagagaagggaaagaacatcaagattatcagcaaaatcgagaatcatgagggggttcggaggtttgatgaaatcctggaggccagtgatgggatcatggtggctcgtggtgatctaggcattgagattcctgcagagaaggtcttccttgctcagaagatgatgattggacggtgcaaccgagctgggaagcctgtcatctgtgctactcagatgctggagagcatgatcaagaagccccgccccactcgggctgaaggcagtgatgtggccaatgcagtcctggatggagccgactgcatcatgctgtctggagaaacagccaaaggggactatcctctggaggctgtgcgcatgcagcacctgattgcccgtgaggcagaggctgccatctaccacttgcaattatttgaggaactccgccgcctggcgcccattaccagcgaccccacagaagccaccgccgtgggtgccgtggaggcctccttcaagtgctgcagtggggccataatcgtcctcaccaagtctggcaggtctgctcaccaggtggccagataccgcccacgtgcccccatcattgctgtgacccggaatccccagacagctcgtcaggcccacctgtaccgtggcatcttccctgtgctgtgcaaggacccagtccaggaggcctgggctgaggacgtggacctccgggtgaactttgccatgaatgttggcaaggcccgaggcttcttcaagaagggagatgtggtcattgtgctgaccggatggcgccctggctccggcttcaccaacaccatgcgtgttgttcctgtgccgtgatggaccccagagcccctcctccagcccctgtcccacccccttcccccagcccatccattaggccagcaacgcttgtagaactcactctgggctgtaacgtggcactggtaggttgggacaccagggaagaagatcaacgcctcactgaaacatggctgtgtttgcagcctgctctagtgggacagcccagagcctggctgcccatcatgtggccccacccaatcaagggaagaaggaggaatgctggactggaggcccctggagccagatggcaagagggtgacagcttcctttcctgtgtgtactctgtccagttcctttagaaaaaatggatgcccagaggactcccaaccctggcttggggtcaagaaacagccagcaagagttaggggccttagggcactgggctgttgttccattgaagccgactctggccctggcccttacttgcttctctagctctctaggcctctccagtttgcacctgtccccaccctccactcagctgtcctgcagcaaacactccaccctccaccttccattttcccccactactgcagcacctccaggcctgttgctatagagcctacctgtatgtcaataaacaacagctgaagcacct

SEQ ID NO: 925 - DNA, 2479 bp, Homo sapiens
cgccgcgcttcctcctgaaggtgactgcgcccgcggggacgcagggggcggggcccgggtcgcccggagccgggattgggcagagggcggggcggcggagggattgcggcggcccgcagcgggataaccttgaggctgaggcagtggctccttgcacagcagctgcacgcgccgtggctccggatctcttcgtctttgcagcgtagcccgagtcggtcagcgccggaggacctcagcagccatgtcgaagccccatagtgaagccgggactgccttcattcagacccagcagctgcacgcagccatggctgacacattcctggagcacatgtgccgcctggacattgattcaccacccatcacagcccggaacactggcatcatctgtaccattggcccagcttcccgatcagtggagacgttgaaggagatgattaagtctggaatgaatgtggctcgtctgaacttctctcatggaactcatgagtaccatgcggagaccatcaagaatgtgcgcacagccacggaaagctttgcttctgaccccatcctctaccggcccgttgctgtggctctagacactaaaggacctgagatccgaactgggctcatcaagggcagcggcactgcagaggtggagctgaagaagggagccactctcaaaatcacgctggataacgcctacatggaaaagtgtgacgagaacatcctgtggctggactacaagaacatctgcaaggtggtggaagtgggcagcaagatctacgtggatgatgggcttatttctctccaggtgaagcagaaaggtgccgacttcctggtgacggaggtggaaaatggtggctccttgggcagcaagaagggtgtgaaccttcctggggctgctgtggacttgcctgctgtgtcggagaaggacatccaggatctgaagtttggggtcgagcaggatgttgatatggtgtttgcgtcattcatccgcaaggcatctgatgtccatgaagttaggaaggtcctgggagagaagggaaagaacatcaagattatcagcaaaatcgagaatcatgagggggttcggaggtttgatgaaatcctggaggccagtgatgggatcatggtggctcgtggtgatctaggcattgagattcctgcagagaaggtcttccttgctcagaagatgatgattggacggtgcaaccgagctgggaagcctgtcatctgtgctactcagatgctggagagcatgatcaagaagccccgccccactcgggctgaaggcagtgatgtggccaatgcagtcctggatggagccgactgcatcatgctgtctggagaaacagccaaaggggactatcctctggaggctgtgcgcatgcagcacctgattgcccgtgaggcagaggctgccatctaccacttgcaattatttgaggaactccgccgcctggcgcccattaccagcgaccccacagaagccaccgccgtgggtgccgtggaggcctccttcaagtgctgcagtggggccataatcgtcctcaccaagtctggcaggtctgctcaccaggtggccagataccgcccacgtgcccccatcattgctgtgacccggaatccccagacagctcgtcaggcccacctgtaccgtggcatcttccctgtgctgtgcaaggacccagtccaggaggcctgggctgaggacgtggacctccgggtgaactttgccatgaatgttggcaaggcccgaggcttcttcaagaagggagatgtggtcattgtgctgaccggatggcgccctggctccggcttcaccaacaccatgcgtgttgttcctgtgccgtgatggaccccagagcccctcctccagcccctgtcccacccccttcccccagcccatccattaggccagcaacgcttgtagaactcactctgggctgtaacgtggcactggtaggttgggacaccagggaagaagatcaacgcctcactgaaacatggctgtgtttgcagcctgctctagtgggacagcccagagcctggctgcccatcatgtggccccacccaatcaagggaagaaggaggaatgctggactggaggcccctggagccagatggcaagagggtgacagcttcctttcctgtgtgtactctgtccagttcctttagaaaaaatggatgcccagaggactcccaaccctggcttggggtcaagaaacagccagcaagagttaggggccttagggcactgggctgttgttccattgaagccgactctggccctggcccttacttgcttctctagctctctaggcctctccagtttgcacctgtccccaccctccactcagctgtcctgcagcaaacactccaccctccaccttccattttcccccactactgcagcacctccaggcctgttgctatagagcctacctgtatgtcaataaacaacagctgaagcaccaaaaaaaaaaaaaaaaaaaaa

SEQ ID NO: 926 - DNA, 2498 bp, Homo sapiens
ccaccgaaagggcaacctgcccgcgcgttccgccgccgccgccgcgcttcctcctgaaggtgactgcgcccgcggggacgcagggggcggggcccgggtcgcccggagccgggattgggcagagggcggggcggcggagggattgcggcggcccgcagcgggataaccttgaggctgaggcagtggctccttgcacagcagctgcacgcgccgtggctccggatctcttcgtctttgcagcgtagcccgagtcggtcagcgccggaggacctcagcagccatgtcgaagccccatagtgaagccgggactgccttcattcagacccagcagctgcacgcagccatggctgacacattcctggagcacatgtgccgcctggacattgattcaccacccatcacagcccggaacactggcatcatctgtaccattggcccagcttcccgatcagtggagacgttgaaggagatgattaagtctggaatgaatgtggctcgtctgaacttctctcatggaactcatgagtaccatgcggagaccatcaagaatgtgcgcacagccacggaaagctttgcttctgaccccatcctctaccggcccgttgctgtggctctagacactaaaggacctgagatccgaactgggctcatcaagggcagcggcactgcagaggtggagctgaagaagggagccactctcaaaatcacgctggataacgcctacatggaaaagtgtgacgagaacatcctgtggctggactacaagaacatctgcaaggtggtggaagtgggcagcaagatctacgtggatgatgggcttatttctctccaggtgaagcagaaaggtgccgacttcctggtgacggaggtggaaaatggtggctccttgggcagcaagaagggtgtgaaccttcctggggctgctgtggacttgcctgctgtgtcggagaaggacatccaggatctgaagtttggggtcgagcaggatgttgatatggtgtttgcgtcattcatccgcaaggcatctgatgtccatgaagttaggaaggtcctgggagagaagggaaagaacatcaagattatcagcaaaatcgagaatcatgagggggttcggaggtttgatgaaatcctggaggccagtgatgggatcatggtggctcgtggtgatctaggcattgagattcctgcagagaaggtcttccttgctcagaagatgatgattggacggtgcaaccgagctgggaagcctgtcatctgtgctactcagatgctggagagcatgatcaagaagccccgccccactcgggctgaaggcagtgatgtggccaatgcagtcctggatggagccgactgcatcatgctgtctggagaaacagccaaaggggactatcctctggaggctgtgcgcatgcagcacctgatagctcgtgaggctgaggcagccatgttccaccgcaagctgtttgaagaacttgtgcgagcctcaagtcactccacagacctcatggaagccatggccatgggcagcgtggaggcttcttataagtgtttagcagcagctttgatagttctgacggagtctggcaggtctgctcaccaggtggccagataccgcccacgtgcccccatcattgctgtgacccggaatccccagacagctcgtcaggcccacctgtaccgtggcatcttccctgtgctgtgcaaggacccagtccaggaggcctgggctgaggacgtggacctccgggtgaactttgccatgaatgttggcaaggcccgaggcttcttcaagaagggagatgtggtcattgtgctgaccggatggcgccctggctccggcttcaccaacaccatgcgtgttgttcctgtgccgtgatggaccccagagcccctcctccagcccctgtcccacccccttcccccagcccatccattaggccagcaacgcttgtagaactcactctgggctgtaacgtggcactggtaggttgggacaccagggaagaagatcaacgcctcactgaaacatggctgtgtttgcagcctgctctagtgggacagcccagagcctggctgcccatcatgtggccccacccaatcaagggaagaaggaggaatgctggactggaggcccctggagccagatggcaagagggtgacagcttcctttcctgtgtgtactctgtccagttcctttagaaaaaatggatgcccagaggactcccaaccctggcttggggtcaagaaacagccagcaagagttaggggccttagggcactgggctgttgttccattgaagccgactctggccctggcccttacttgcttctctagctctctaggcctctccagtttgcacctgtccccaccctccactcagctgtcctgcagcaaacactccaccctccaccttccattttcccccactactgcagcacctccaggcctgttgctatagagcctacctgtatgtcaataaacaacagctgaagcacct

SEQ ID NO: 927 - DNA, 2287 bp, Homo sapiens
ggctgaggcagtggctccttgcacagcagctgcacgcgccgtggctccggatcttcttcgtctttgcagcgtagcccgagtcggtcagcgccagaggacctcagcagccatgtcgaagccccatagtgaagccgggactgccttcattcagacccagcagctgcacgcagccatggctgacacattcctggagcacatgtgccgcctggacattgattcaccacccatcacagcccggaacactggcatcatctgtaccattggcccagcttcccgatcagtggagacgttgaaggagatgattaagtctggaatgaatgtggctcgtctgaacttctctcatggaactcatgagtaccatgcggagaccatcaagaatgtgcgcacagccacggaaagctttgcttctgaccccatcctctaccggcccgttgctgtggctctagacactaaaggacctgagatccgaactgggctcatcaagggcagcggcactgcagaggtggagctgaagaagggagccactctcaaaatcacgctggataacgcctacatggaaaagtgtgacgagaacatcctgtggctggactacaagaacatctgcaaggtggtggaagtgggcagcaagatctacgtggatgatgggcttatttctctccaggtgaagcagaaaggtgccgacttcctggtgacggaggtggaaaatggtggctccttgggcagcaagaagggtgtgaaccttcctggggctgctgtggacttgcctgctgtgtcggagaaggacatccaggatctgaagtttggggtcgagcaggatgttgatatggtgtttgcgtcattcatccgcaaggcatctgatgtccatgaagttaggaaggtcctgggagagaagggaaagaacatcaagattatcagcaaaatcgagaatcatgagggggttcggaggtttgatgaaatcctggaggccagtgatgggatcatggtggctcgtggtgatctaggcattgagattcctgcagagaaggtcttccttgctcagaagatgatgattggacggtgcaaccgagctgggaagcctgtcatctgtgctactcagatgctggagagcatgatcaagaagccccgccccactcgggctgaaggcagtgatgtggccaatgcagtcctggatggagccgactgcatcatgctgtctggagaaacagccaaaggggactatcctctggaggctgtgcgcatgcagaacctgattgcccgtgaggcagaggctgccatctaccacttgcaattatttgaggaactccgccgcctggcgcccattaccagcgaccccacagaagccaccgccgtgggtgccgtggaggcctccttcaagtgctgcagtggggccataatcgtcctcaccaagtctggcaggtctgctcaccaggtggccagataccgcccacgtgcccccatcattgctgtgacccggaatccccagacagctcgtcaggcccacctgtaccgtggcatcttccctgtgctgtgcaaggacccagtccaggaggcctgggctgaggacgtggacctccgggtgaactttgccatgaatgttggcaaggcccgaggcttcttcaagaagggagatgtggtcattgtgctgaccggatggcgccctggctccggcttcaccaacaccatgcgtgttgttcctgtgccgtgatggaccccagagcccctcctccagcccctgtcccacccccttcccccagcccatccattaggccagcaacgcttgtagaactcactctgggctgtaacgtggcactggtaggttgggacaccagggaagaagatcaacgcctcactgaaacatggctgtgtttgcagcctgctctagtgggacagcccagagcctggctgccccatcatgtggccccacccaatcaagggaagaaggaggaatgctggactggaggcccctggagccagatggcaagagggtgacagcttcctttcctgtgtgtactctgtccagttcctttagaaaaaatggatgcccagaggactcccaaccctggcttggggtcaagaaacagccagcaagagttaggggccttagggcactgggctgttgttccattgaagccgactctggccctggcccttacttgcttctctagctctctaggcctctccagtttgcacctgtccccaccctccactcagctgtcctgcagcaaacactccaccctccaccttccattttcccccactactgcagcacctccaggcctgttgccgc

SEQ ID NO: 928 - DNA, 2117 bp, Homo sapiens
ggcagtggctccttgcacagcagctgcacgcgccgtggctccggatctcttcgtctttgcagcgtagcccgagtcggtcagcgccggaggtgagcgccatgtcgaagccccatagtgaagccgggactgccttcattcagacccagcagctgcacgcagccatggctgacacattcctggagcacatgtgccgcctggacattgattcaccacccatcacagcccggaacactggcatcatctgtaccattggcccagcttcccgatcagtggagacgttgaaggagatgattaagtctggaatgaatgtggctcgtctgaacttctctcatggaactcatgagtaccatgcggagaccatcaagaatgtgcgcacagccacggaaagctttgcttctgaccccatcctctaccggcccgttgctgtggctctagacactaaaggacctgagatccgaactgggctcatcaagggcagcggcactgcagaggtggagctgaagaagggagccactctcaaaatcacgctggataacgcctacatggaaaagtgtgacgagaacatcctgtggctggactacaagaacatctgcaaggtggtggaagtgggcagcaagatctacgtggatgatgggcttatttctctccaggtgaagcagaaaggtgccgacttcctggtgacggaggtggaaaatggtggctccttgggcagcaagaagggtgtgaaccttcctggggctgctgtggacttgcctgctgtgtcggagaaggacatccaggatctgaagtttggggtcgagcaggatgttgatatggtgtttgcgtcattcatccgcaaggcatctgatgtccatgaagttaggaaggtcctgggagagaagggaaagaacatcaagattatcagcaaaatcgagaatcatgagggggttcggaggcagtttgatgaaatcctggaggccagtgatgggatcatggtggctcgtggtgatctaggcattgagattcctgcagagaaggtcttccttgctcagaagatgatgattggacggtgcaaccgagctgggaagcctgtcatctgtgctactcaggcatatgctggagagcatgatcaagaagccccgccccactcgggctgaaggcagtgatgtggccaatgcagtcctggatggagccgactgcatcatgctgtctggagaaacagccaaaggggactatcctctggaggctgtgcgcatgcagcacctgattgcccgtgaggcagaggctgccatctaccacttgcaattatttgaggaactccgccgcctggcgcccattaccagcgaccccacagaagccaccgccgtgggtgccgtggaggcctccttcaagtgctgcagtggggccataatcgtcctcaccaagtctggcaggtctgctcaccaggtggccagataccgcccacgtgcccccatcattgctgtgacccggaatccccagacagctcgtcaggcccacctgtaccgtggcatcttccctgtgctgtgcaaggacccagtccaggaggcctgggctgaggacgtggacctccgggtgaactttgccatgaatgttggcaaggcccgaggcttcttcaagaagggagatgtggtcattgtgctgaccggatggcgccctggctccggcttcaccaacaccatgcgtgttgttcctgtgccgtgatggaccccagagcccctcctccagcccctgtcccacccccttcccccagcccatccatggtaggttgggacaccagggaagaagatcaacgcctcactgaaacatggctgtgtttgcagcctgctctagtgggacagcccagagcctggctgcccatcatgtggccccacccaatcaagggaagaaggaggaatgctggactggaggcccctggagccagatggcaagagggtgacagcttcctttcctgtgtgtactctgtccagttcctttagaaaaaccgactctggccctggcccttacttgcttctctagctctctaggcctctccagtttgcacctgtccccaccctccactcagctgtcctgcagcaaacactccaccctccaccttccattttcccccactactgcag

SEQ ID NO: 929 - DNA, 2332 bp, Homo sapiens
gcacagcagctgcacgcgccgtggctccggatctcttcgtctttgcagcgtagcccgagtcggtcagcgccggaggacctcagcagccatgtcgaagccccatagtgaagccgggactgccttcattcagacccagcagctgcacgcagccatggctgacacattcctggagcacatgtgccgcctggacattgattcaccacccatcacagcccggaacactggcatcatctgtaccattggcccagcttcccgatcagtggagacgttgaaggagatgattaagtctggaatgaatgtggctcgtctgaacttctctcatggaactcatgagtaccatgcggagaccatcaagaatgtgcgcacagccacggaaagctttgcttctgaccccatcctctaccggcccgttgctgtggctctagacactaaaggacctgagatccgaactgggctcatcaagggcagcggcactgcagaggtggagctgaagaagggagccactctcaaaatcacgctggataacgcctacatggaaaagtgtgacgagaacatcctgtggctggactacaagaacatctgcaaggtggtggaagtgggcagcaagatctacgtggatgatgggcttatttctctccaggtgaagcagaaaggtgccgacttcctggtgacggaggtggaaaatggtggctccttgggcagcaagaagggtgtgaaccttcctggggctgctgtggacttgcctgctgtgtcggagaaggacatccaggatctgaagtttggggtcgagcaggatgttgatatggtgtttgcgtcattcatccgcaaggcatctgatgtccatgaagttaggaaggtcctgggagagaagggaaagaacatcaagattatcagcaaaatcgagaatcatgagggggttcggaggtttgatgaaatcctggaggccagtgatgggatcatggtggctcgtggtgatctaggcattgagattcctgcagagaaggtcttccttgctcagaagatgatgattggacggtgcaaccgagctgggaagcctgtcatctgtgctactcagatgctggagagcatgatcaagaagccccgccccactcgggctgaaggcagtgatgtggccaatgcagtcctggatggagccgactgcatcatgctgtctggagaaacagccaaaggggactatcctctggaggctgtgcgcatgcagcacctgattgcccgtgaggcagaggctgccatctaccacttgcaattatttgaggaactccgccgcctggcgcccattaccagcgaccccacagaagccaccgccgtgggtgccgtggaggcctccttcaagtgctgcagtggggccataatcgtcctcaccaagtctggcaggtctgctcaccaggtggccagataccgcccacgtgcccccatcattgctgtgacccggaatccccagacagctcgtcaggcccacctgtaccgtggcatcttccctgtgctgtgcaaggacccagtccaggaggcctgggctgaggacgtggacctccgggtgaactttgccatgaatgttggcaaggcccgaggcttcttcaagaagggagatgtggtcattgtgctgaccggatggcgccctggctccggcttcaccaacaccatgcgtgttgttcctgtgccgtgatggaccccagagcccctcctccagcccctgtcccacccccttcccccagcccatccattaggccagcaacgcttgtagaactcactctgggctgtaacgtggcactggtaggttgggacaccagggaagaagatcaacgcctcactgaaacatggctgtgtttgcagcctgctctagtgggacagcccagagcctggctgcccatcatgtggccccacccaatcaagggaagaaggaggaatgctggactggaggcccctggagccagatggcaagagggtgacagcttcctttcctgtgtgtactctgtccagttcctttagaaaaaatggatgcccagaggactcccaaccctggcttggggtcaagaaacagccagcaagagttaggggccttagggcactgggctgttgttccattgaagccgactctggccctggcccttacttgcttctctagctctctaggcctctccagtttgcacctgtccccaccctccactcagctgtcctgcagcaaacactccaccctccaccttccattttcccccactactgcagcacctccaggcctgttgctatagagcctacctgtatgtcaataaacaacagctgaagcaaaaaaaaaaaaaaaaaaaaaaaaaaaaaa

SEQ ID NO: 930 - DNA, 1863 bp, Homo sapiens
gtcagcactggaggacctcagcagccatgttgaagccccatagtgaagccgggactgccttcattcagacccagcagctacatgcagccacggctgacacattcctggagcacatgtgccacctggacattcacacaccacccatcccagcctggaacactggcatcatctgtaccattagcccagcttcccaatcggtggagatgttgaaggagatgattaagtctggaacgaatgtggcttgtctgaacttctctcatggaactcatgagtaccacgtggagaccatcaagaacatgtgcacagccacggaaagctttgctgctgaccccatcctctaccggcctgttgctttggctctggatactaaaggacctgagatccgaactgggctcatcaagggcagcagcaccatggaggtggggctgaagatgggagccactctcaaaatcatgctggataacacctacatgaaaaagtgtgacgagaacatcctgtggctggactacaagaacatctgcaaggtgatggaagtgggcagcaagatctacgtggatgatgggcttatttctctccaggtaaagcagaaaggtgctgacttcctggtgacggaggtggaaactggtggttcctcgggcagcaagaagggtgtgaaccttcctggggctgctgtggacttgcctgctgtgtcagaggacatccaggacctgaattttggggtcgagcaggatgtcgatatggtgtttgcgtcgttcatccgcaaggcatctgatgtccatgaagttagggaggccctgggagagaagggaaagaacatcaagacaatcaacacaatcgagaatcatgtgggggttcagaggtttgatgaaatcctagaggccagtgatgggatcatggtggctcgtggtaatccaggcattgagattcctgcagagaaggtcttccttgctcagaggatgatgattgggcgttgcagctgagctgggaagcctatctgtgacagtgatgtggccagtgcagtactgaatggagccgactgcatcatgctgtctggagaaacagccaaagcggactatctggaggctgggcgcatgcagcacctgattgcccatgaggcagaggccaccatctaccacttgcaattatttgaggaactcccacccactggcgcccattactagcgaccccacgaaagccaccgccgtgggtgccaacgaggcctccttcaagtgctgcagtggggccataatcgtcctcaccaagtctggcaggtctgctcaccaggtggctagataccgcccacgtgcccccatcattgctgtgacacggaatccccagacagctagtcaggcccacctgtaccgtggcatcttccctgtgctgtgcaaggacccagtccaggaggccagggctgaggatgtggaccgctgggtgaacttggccctgaatgttggcaaggcccgaggcttctttaagaagggagacatgtggtcattgtgctgaccgggtggcgccctggctctggcttcaccaacaccatgcgtgttgttcctgtgcggtgatggaccccaaagcccctgctccagcgcctgtcccacctcctttccccgaaccatccattaggccaacaacgcttgggccttagggcacaggacagttcttccatttaagtactctggcctgacccttacttgcttccccaaacccctgggcctccccaatttgcgcctgtccccaccctccactcagctgtcctgcggcaaacactccaccctccaccttccattttcccccactactgcagcacctccgggcctgttgctatagagcctacctgtatatcaataaacaacagctgaagtt

SEQ ID NO: 931 - DNA, 2117 bp, Homo sapiens
ggcagtggctccttgcacagcagctgcacgcgccgtggctccggatctcttcgtctttgcagcgtagcccgagtcggtcagcgccggaggtgagcgccatgtcgaagccccatagtgaagccgggactgccttcattcagacccagcagctgcacgcagccatggctgacacattcctggagcacatgtgccgcctggacattgattcaccacccatcacagcccggaacactggcatcatctgtaccattggcccagcttcccgatcagtggagacgttgaaggagatgattaagtctggaatgaatgtggctcgtctgaacttctctcatggaactcatgagtaccatgcggagaccatcaagaatgtgcgcacagccacggaaagctttgcttctgaccccatcctctaccggcccgttgctgtggctctagacactaaaggacctgagatccgaactgggctcatcaagggcagcggcactgcagaggtggagctgaagaagggagccactctcaaaatcacgctggataacgcctacatggaaaagtgtgacgagaacatcctgtggctggactacaagaacatctgcaaggtggtggaagtgggcagcaagatctacgtggatgatgggcttatttctctccaggtgaagcagaaaggtgccgacttcctggtgacggaggtggaaaatggtggctccttgggcagcaagaagggtgtgaaccttcctggggctgctgtggacttgcctgctgtgtcggagaaggacatccaggatctgaagtttggggtcgagcaggatgttgatatggtgtttgcgtcattcatccgcaaggcatctgatgtccatgaagttaggaaggtcctgggagagaagggaaagaacatcaagattatcagcaaaatcgagaatcatgagggggttcggaggcagtttgatgaaatcctggaggccagtgatgggatcatggtggctcgtggtgatctaggcattgagattcctgcagagaaggtcttccttgctcagaagatgatgattggacggtgcaaccgagctgggaagcctgtcatctgtgctactcaggcatatgctggagagcatgatcaagaagccccgccccactcgggctgaaggcagtgatgtggccaatgcagtcctggatggagccgactgcatcatgctgtctggagaaacagccaaaggggactatcctctggaggctgtgcgcatgcagcacctgatagctcgtgaggctgaggcagccatgttccaccgcaagctgtttgaagaacttgtgcgagcctcaagtcactccacagacctcatggaagccatggccatgggcagcgtggaggcttcttataagtgtttagcagcagctttgatagttctgacggagtctggcaggtctgctcaccaggtggccagataccgcccacgtgcccccatcattgctgtgacccggaatccccagacagctcgtcaggcccacctgtaccgtggcatcttccctgtgctgtgcaaggacccagtccaggaggcctgggctgaggacgtggacctccgggtgaactttgccatgaatgttggcaaggcccgaggcttcttcaagaagggagatgtggtcattgtgctgaccggatggcgccctggctccggcttcaccaacaccatgcgtgttgttcctgtgccgtgatggaccccagagcccctcctccagcccctgtcccacccccttcccccagcccatccatggtaggttgggacaccagggaagaagatcaacgcctcactgaaacatggctgtgtttgcagcctgctctagtgggacagcccagagcctggctgcccatcatgtggccccacccaatcaagggaagaaggaggaatgctggactggaggcccctggagccagatggcaagagggtgacagcttcctttcctgtgtgtactctgtccagttcctttagaaaaaccgactctggccctggcccttacttgcttctctagctctctaggcctctccagtttgcacctgtccccaccctccactcagctgtcctgcagcaaacactccaccctccaccttccattttcccccactactgcag

SEQ ID NO: 932 - DNA, 776 bp, Homo sapiens
ctattcatcaagtctggcaagtctgctcaccaggtggccagatatcacccacatgcccccatcattgctgtgacacggaatccccagacagctcgttaggcccacctgtaccgtggcatcttccctgtgctgtgcaaggacccagtccaagaggcctgggctgaggacgtggacctccgggtgaacttggccatgaatgttggcaaggcccaagccttcttcaagaagggagatgtggtcattgtgctgaccgggtggcaccctggctccggcttcaccaacaccatgtgtgttgttcctgtgccgtgatggaccccagagcccctcctccagctcctgtcccacccccttcccccaacccatccattaggccagcaacgcttgtagagctcactgtgggctgtaatgtggcactggtgggctgggacaccagggaagaagatcaatgcctcgctgaaacatggctgtgtttacagcctgctccagtgggacagcccagagcctggctgcccatcatgtggccccacccaatcaagggaagaaggaggaatgctggactggaggccccaggagccagatggcaagagggtgacagcttcctttcttgtgtttactctgttcagttcctttagaaaatggatgcccagaggactcccaactctggcctggggtcaggaaacagccagcgagagttaggggccttagggcacagggcagttgctccactgaagcagactctggccctggcccttacttgcttcctcaaccccctgggc

SEQ ID NO: 933 - DNA, 2004 bp, Homo sapiens
tgaaagtgggcacagctgctgcacatcccggggctcctgacctctctgcgtttgcagcgtagcccaagtcggtcagcactggaggacctcagaagccatgttgaagccccatagtgaagccagggctgccttcattcagacccagcagctgcacgcagccatggctgacacattcttggagcacatgtgctgcctggacactgactcgccacccatcacagcctggagcactggcatcatccgtactatgggcccagcttctccattgctagagatgctgaagaaaacgattaagtctggaattaatgtggctcatctgaactctcatggagcccatgagtaccatacagagaccatcaagaacgtgcgcacagccacggaaagctttgcttctgactccatcctctaccagcccattgctgtggctccagacactaaaggacctgagatcccaactgggcccgtcaagggcagcggcactgcagaggtggagctgaagaagggagccactctcaagttcacgctggataatacctacatggaaaagggtaagagaacatcctgtggcgggactacaagaacatctgcaaggtggtggaagtgggctgcaagatctacgtggatgatgggctaatttctctccaagtgaagcagaaggatgctcactttctggtgacagaggtggaaaatggtggctccttgggcagcaagaagagtgtgaaccttcctggggctgccgtggacctgcctgccatgttggagaaggacatccaggacctgaagtttgggggcgagcaagatgtcgatatgatgttttcatcattcatctgcaagacatctgatgtccatgaagttaggaaggtcttgggagagaaaggaaagaacagcaagataaccagcaaaattgagaatcatgatgggggttggaggtttgatgaaatcctggaggccagcgatgggattatggtagctcgtggtgatccaccacaagccgtcgagatgagattcctgcagggaaggtctgccttgctcagaggatgatgattgggtggtgcaaccaagctgggaagcctgtcatcttgccactcagatgctagaggatgtgatcaagaagctccaccccacttgggctgagggcagtggtgtggccaatgcagttctggtggaagctgactgcatcatgctgtctggagaaacagccaaagggaactatcctctggaggctgtgcacatgcagcacctgattgcctgtgaggcagaggccaccatctaccacttgcaattatttgaggagttctgccacctggcacccattaccagtgaccccgcagaagctactgccgtgggcactgtggaggcctccttcaagtgctgcagtggggccataatcgtcctcaccaagtctgcaggtgtgcccaccaggtggccagatactgcccacgtgcccccatgattgttgtgacatggcatccccaggcagctcgccaggcccacctgtaccgtggtatcttccctgtgctgtgtaaggaccccatccaggagccctaggctgaggatgtggacctccgagtgaacttggccatgaatgttggtaaggcctgaggcttcttcaagaaggatgatgtggtcattgtgctgacctggtgacaccctggccctggcttctccaccaccctgtgtgttattcctgtgctgtgatggactccagagctcttcctccagcccctgtcccacccccttcccccaatgcatccattaggccagcaatgcttatagagctcactctgggctgtagtgtggcactggtgggctggaacaccagggaagaagatttatgcctcgctgaaacgtggctgtttttagagcctgctgtggcgggagagcccggagcctggctgcccatcatgtggccccacccaagcaagagaagaaggaggaatgcagaacagaggcccccagagtgtatggcaagagggtggcagcttcctttcttctgtgtactct

SEQ ID NO: 934 - DNA, 4632 bp, Homo sapiens
ttctgctgggcctcaggtgagactgcagctccagtcatcatcttgattgcagcccacagaaactaccaacccacagaaactgtaggtagagcaagaagatggtgtttctgcccctcaaatggtcccttgcaaccatgtcatttctactttcctcactgttggctctcttaactgtgtccactccttcatggtgtcagagcactgaagcatctccaaaacgtagtgatgggacaccatttccttggaataaaatacgacttcctgagtacgtcatcccagttcattatgatctcttgatccatgcaaaccttaccacgctgaccttctggggaaccacgaaagtagaaatcacagccagtcagcccaccagcaccatcatcctgcatagtcaccacctgcagatatctagggccaccctcaggaagggagctggagagaggctatcggaagaacccctgcaggtcctggaacacccccctcaggagcaaattgcactgctggctcccgagcccctccttgtcgggctcccgtacacagttgtcattcactatgctggcaatctttcggagactttccacggattttacaaaagcacctacagaaccaaggaaggggaactgaggatactagcatcaacacaatttgaacccactgcagctagaatggcctttccctgctttgatgaacctgccttcaaagcaagtttctcaatcaaaattagaagagagccaaggcacctagccatctccaatatgccattggtgaaatctgtgactgttgctgaaggactcatagaagaccattttgatgtcactgtgaagatgagcacctatctggtggccttcatcatttcagattttgagtctgtcagcaagataaccaagagtggagtcaaggtttctgtttatgctgtgccagacaagataaatcaagcagattatgcactggatgctgcggtgactcttctagaattttatgaggattatttcagcataccgtatcccctacccaaacaagatcttgctgctattcccgactttcagtctggtgctatggaaaactggggactgacaacatatagagaatctgctctgttgtttgatgcagaaaagtcttctgcatcaagtaagcttggcatcacaatgactgtggcccatgaactggcccaccagtggtttgggaacctggtcactatggaatggtggaatgatctttggctaaatgaaggatttgccaaatttatggagtttgtgtctgtcagtgtgacccatcctgaactgaaagttggagattatttctttggcaaatgttttgacgcaatggaggtagatgctttaaattcctcacaccctgtgtctacacctgtggaaaatcctgctcagatccgggagatgtttgatgatgtttcttatgataagggagcttgtattctgaatatgctaagggagtatcttagcgctgacgcatttaaaagtggtattgtacagtatctccagaagcatagctataaaaatacaaaaaacgaggacctgtgggatagtatggcaagtatttgccctacagatggtgtaaaagggatggatggcttttgctctagaagtcaacattcatcttcatcctcacattggcatcaggaaggggtggatgtgaaaaccatgatgaacacttggacactgcagaggggttttcccctaataaccatcacagtgagggggaggaatgtacacatgaagcaagagcactacatgaagggctctgacggcgccccggacactgggtacctgtggcatgttccattgacattcatcaccagcaaatccgacatggtccatcgatttttgctaaaaacaaaaacagatgtgctcatcctcccagaagaggtggaatggatcaaatttaatgtgggcatgaatggctattacattgtgcattacgaggatgatggatgggactctttgactggccttttaaaaggaacacacacagcagtcagcagtaatgatcgggcaagtctcattaacaatgcatttcagctcgtcagcattgggaagctgtccattgaaaaggccttggatttatccctgtacttgaaacatgaaactgaaattatgcccgtgtttcaaggtttgaatgagctgattcctatgtataagttaatggagaaaagagatatgaatgaagtggaaactcaattcaaggccttcctcatcaggctgctaagggacctcattgataagcagacatggacagacgagggctcagtctcagagcgaatgctgcggagtgaactactactcctcgcctgtgtgcacaactatcagccgtgcgtacagagggcagaaggctatttcagaaagtggaaggaatccaatggaaacttgagcctgcctgtcgacgtgaccttggcagtgtttgctgtgggggcccagagcacagaaggctgggattttctttatagtaaatatcagttttctttgtccagtactgagaaaagccaaattgaatttgccctctgcagaacccaaaataaggaaaagcttcaatggctactagatgaaagctttaagggagataaaataaaaactcaggagtttccacaaattcttacactcattggcaggaacccagtaggatacccactggcctggcaatttctgaggaaaaactggaacaaacttgtacaaaagtttgaacttggctcatcttccatagcccacatggtaatgggtacaacaaatcaattctccacaagaacacggcttgaagaggtaaaaggattcttcagctctttgaaagaaaatggttctcagctccgttgtgtccaacagacaattgaaaccattgaagaaaacatcggttggatggataagaattttgataaaatcagagtgtggctgcaaagtgaaaagcttgaacgtatgtaaaaattcctcccttgccaggttcctgttatctctaatcaccaacattttgttgagtgtattttcaaactagagatggctgttttggctccaactggagatacttttttcccttcaactcattttttgactatccctgtgaaaagaatagctgttagtttttcatgaatgggctatcgctaccatgtgttttgttcatcacaggtgttgccctgcaacgtaaacccaagtgttgggttccctgccacagaagaataaagtaccttattcttctcattttatagtttatgcttaagcacccgtgtccaaaaccctgtaccccatgtttatcattcataaactgtttcatcagtctcctcgaaagactctgaatagtcgactactgaacaatgaacacctggatctgagactaagccggacgatgactgggttaaagctctcccggctcacccctccagacccgctgcccatccctcttccttgctccatgcccaggggctgacttgtaaaggccaagtcatcaagctttcttgccctttggatgttggtcagtggggagccggagagctggagctggggtcggaggaggtagtaggtggaggtgttcttccctgattcccttgcgggatgcctcgggctggcctcccctgagggtcttagctccgagaggggaccctcttttccacacagccttctccacctctggattttggtaactgctccctcctcatcccttcaggattagtggcctcagtgggagtctggcttttactagtcctggcggacttgtggtttctacataatgtgctcgcacttttgcaaaaaatctttttatagaaccctcctcagataattctgagtgtcatctatttccctgactggtacagtatctcttctgaaaaagcagagtgcattcaagtctgtaggaaaacccttttcttagggaggtgattttttttctctctctgcttcttatttggcctactttacaatttctaactaactagttattggcatttactgacagtaaattattgcagtcaccaataaatgatagtacattgtgaaacaaaatatttgctcatattagcaaataggacattctttggctttgaagtctttcttttgtgaagacttcacacacggttgcttcagcacacagttgctgctcaggttttatgtatagatgataataatagaaagcacagtttactaacatggtaaaccaacggagttcaagtcaagtcagttaataccctaagaattagattttatttcttattctgaaaacttgctacacagggacttatctaacccatagtgtgctctgttgctgacttgattcaagttgcagcgtgttttgcgctgactctaaggtgcggaaatcctcacacctggcaaaggagaattcaaactgaacttttgaatggtttaataaaaatagaaatcactggtaatttccaccccaaactaaactatttcccttcttttaaaaaaatacacaaccaagattttaatgtaaaatattttgctttaattgtattttatgccttgattaatgaaacatggaaatattgattttcagttttggtcacctgaggaacctatctttgtttgcttttggaaaagcccattttctaaacagatacaatattgccacaacaatgtgcagaaacctttttgataataaaaaattgttctttgcctctaa

SEQ ID NO: 935 - DNA, 6768 bp, Homo sapiens
tttaccaattcccttcctgggagttgcggcttccctcgctcggccccactcccgtttaccctttccccagctcccgccttagccaggggcttccccgcctgccgctagggctcgggccgaagcgccgctcagcgccagcctgccgctccccgggctccactttcactttcggtcctgggggagctaggccggcggcagtggtggtggcggcggcgcaagggtgagggcggccccagaaccccaggtaggtagagcaagaagatggtgtttctgcccctcaaatggtcccttgcaaccatgtcatttctactttcctcactgttggctctcttaactgtgtccactccttcatggtgtcagagcactgaagcatctccaaaacgtagtgatgggacaccatttccttggaataaaatacgacttcctgagtacgtcatcccagttcattatgatctcttgatccatgcaaaccttaccacgctgaccttctggggaaccacgaaagtagaaatcacagccagtcagcccaccagcaccatcatcctgcatagtcaccacctgcagatatctagggccaccctcaggaagggagctggagagaggctatcggaagaacccctgcaggtcctggaacacccccctcaggagcaaattgcactgctggctcccgagcccctccttgtcgggctcccgtacacagttgtcattcactatgctggcaatctttcggagactttccacggattttacaaaagcacctacagaaccaaggaaggggaactgaggatactagcatcaacacaatttgaacccactgcagctagaatggcctttccctgctttgatgaacctgccttcaaagcaagtttctcaatcaaaattagaagagagccaaggcacctagccatctccaatatgccattggtgaaatctgtgactgttgctgaaggactcatagaagaccattttgatgtcactgtgaagatgagcacctatctggtggccttcatcatttcagattttgagtctgtcagcaagataaccaagagtggagtcaaggtttctgtttatgctgtgccagacaagataaatcaagcagattatgcactggatgctgcggtgactcttctagaattttatgaggattatttcagcataccgtatcccctacccaaacaagatcttgctgctattcccgactttcagtctggtgctatggaaaactggggactgacaacatatagagaatctgctctgttgtttgatgcagaaaagtcttctgcatcaagtaagcttggcatcacaatgactgtggcccatgaactggcccaccagtggtttgggaacctggtcactatggaatggtggaatgatctttggctaaatgaaggatttgccaaatttatggagtttgtgtctgtcagtgtgacccatcctgaactgaaagttggagattatttctttggcaaatgttttgacgcaatggaggtagatgctttaaattcctcacaccctgtgtctacacctgtggaaaatcctgctcagatccgggagatgtttgatgatgtttcttatgataagggagcttgtattctgaatatgctaagggagtatcttagcgctgacgcatttaaaagtggtattgtacagtatctccagaagcatagctataaaaatacaaaaaacgaggacctgtgggatagtatggcaagtatttgccctacagatggtgtaaaagggatggatggcttttgctctagaagtcaacattcatcttcatcctcacattggcatcaggaaggggtggatgtgaaaaccatgatgaacacttggacactgcagaggggttttcccctaataaccatcacagtgagggggaggaatgtacacatgaagcaagagcactacatgaagggctctgacggcgccccggacactgggtacctgtggcatgttccattgacattcatcaccagcaaatccgacatggtccatcgatttttgctaaaaacaaaaacagatgtgctcatcctcccagaagaggtggaatggatcaaatttaatgtgggcatgaatggctattacattgtgcattacgaggatgatggatgggactctttgactggccttttaaaaggaacacacacagcagtcagcagtaatgatcgggcaagtctcattaacaatgcatttcagctcgtcagcattgggaagctgtccattgaaaaggccttggatttatccctgtacttgaaacatgaaactgaaattatgcccgtgtttcaaggtttgaatgagctgattcctatgtataagttaatggagaaaagagatatgaatgaagtggaaactcaattcaaggccttcctcatcaggctgctaagggacctcattgataagcagacatggacagacgagggctcagtctcagagcgaatgctgcggagtgaactactactcctcgcctgtgtgcacaactatcagccgtgcgtacagagggcagaaggctatttcagaaagtggaaggaatccaatggaaacttgagcctgcctgtcgacgtgaccttggcagtgtttgctgtgggggcccagagcacagaaggctgggattttctttatagtaaatatcagttttctttgtccagtactgagaaaagccaaattgaatttgccctctgcagaacccaaaataaggaaaagcttcaatggctactagatgaaagctttaagggagataaaataaaaactcaggagtttccacaaattcttacactcattggcaggaacccagtaggatacccactggcctggcaatttctgaggaaaaactggaacaaacttgtacaaaagtttgaacttggctcatcttccatagcccacatggtaatgggtacaacaaatcaattctccacaagaacacggcttgaagaggtaaaaggattcttcagctctttgaaagaaaatggttctcagctccgttgtgtccaacagacaattgaaaccattgaagaaaacatcggttggatggataagaattttgataaaatcagagtgtggctgcaaagtgaaaagcttgaacatgatcctgaagctgacgcaacaggatgaaaatccatcagaatctcagactacagcactaaatatgctttgatgctacatcaaacggaatggaagcatagctgacttcgctaaagttacttcatctccatctagcaaatgaggcactgttctcaaccaaaggagatggggatctggtttagggcaatccctttataatttgatgtgctgtggtctccttggtaatgtataatttggtattgcacaggtgattagtcaaggaagtctggaaaagctttggtcccacagccttgcctcacagcatgtaaataattaaaacaatattgatgctgaggttcttctactgctagtatgaaagtgacaaatttttactggtgtgaattgggaagaaaacaatgctattccatgacgtttgtaaaatgtttgtaaaagctcaaacatgacgattccataaaataaacttgaggttaaataatgggtagtaaattatagaatgtataagaaaaaatataaaggagaaaatcaattatcaggaaagctaaagaacttttcaaatctagtaatttgaatatagacacaatgcactttattgcactttcaattcttataaagcaacaataatattaaggtccttgactatgtgtacaatgttttcacatatatagtttcatttaatcatttcaaagttaatctctgccatctcgctaaatcatcagtcttggctcttctgaaatagaaggtgcctgatcttcctaataattctgcctattttcatttgctttaaacaggcgccctattttctttctagttgtggctgcgcaaaaacatttatctcccaaataagatgtgctgcttaccgaggtatcacggggtggggctccagcttgggtcgttgaagctggggtttgggaaaccacttcagagatggcagcagcaagtttagcatcttcaaatttcttttattgaaaaaaattttattagtaacatgttgtatataaaattatgagcacaatgccatcacttaactataactcttaacgatagcttaatgactgtttattctcttgaccaaatagactcataataacatataattttaaaagaaatttaaattctttcttctctattgtattattttatacaatttgctatttctatttccttctcatattgattattctaaatactatgcaataatataacttagagttccacggtttgtttacacatttcctgttgtacatttaggttattcaaagttttcagctcttttaaaattgctctgaataagttctagtgagtgagttatggtgctggctatattttgctaaactgccctctcaaatgttgctaggaattcatactgcgaaaagcaatgaataagcatgcctgttttcccatggccttgcttgccagaatttgacttttattatgataatcagtgtaaaatgatatactactattgcttgtatattgtggtatacggtgtcaggtttcagggttttttttcaacgttaaatattctagaaactttctgaaataatttctgtttaaaaatattgaatatttgcttcatttcaaatactcccttttgacaaaaaaacttaggtataactgttgatgaaaaaccagaaaaaagtccagaactctttggtgactccaactatggatagcttattttgaaaaaggagaattgcaaattttaccaaaagatggagaaaagcacattaaaaagataccaacattcagaaattcatttcagcatgttattattggaaattatttaaactaatttagataactataagatacttattgtccatttataccctgtaaagccgttttagaatgtaatattttaggtaatccaaaatgtactaaattaaattcatttttagttatgagaaatctttgcttatatgacaaatgaaaagaataacaagttgtcaaatgaaaagaatgacattgaaacatttgtattgtctcttcttaaactatcttattgacttattatttaagccttttaatactaagtatgaaacaacctatggtctggaaatttgtatcgcaaagctatatgtgcatatgttatttaattcatctaatgctacacaaaagcataaaataatgatttttcactctctttaaaaatactaaatcatttatgtccatttctcaattttttcattgatctatgctttgagtttgctttctcaacattattgtattttccacttattattactgtataacatatgctagtgtttagttggattaatcttacctaaaagtactgaaaaatgctttttagtactttttcatattttatacatttattttccgaatgtatcattgaataattttattgagttataaaagtatcttattgctatttaataaaaaattaacacataaaatgacttgaattgtcatcattctttttaagatatttagttaaactgacttaatgtatggccttcaatttttttgtgtccttatttttctgatcatttctccttttatagtttacattaagtctgatctcatattaattacattttctcatctgttgttactaataaacatggcataatgttacttacaaatgtattatctacaagtagtgctatccacaaatatattcaaatgttcccttttaatgtttgtcatttttttcatgtgttgttaatgattcttccatgtgataataagcagaaatgacaataaacttttcatagtttctgcttttaaggaaaatgcctccagcatgatattgaatatttgattctgaaaactaaagactctttaacagattaggggattgcctactttttaaaaagtttttatttataatatgagtatatgtaaaattttaaatagatcttttacatggacatgattatttgtttctatttgatataccactacaatatattgacagttttcctgctactgaatcaatacttataatggcaaataatttaactgtttgttatattctatgtatgctgtatgtaatttttacatctacacatttaagtaactttagctgataccgttatatttgtcagattttaagattagcaccataattactcatagaagcaactatgtgaccccatctttttcatgacatatttatgccacataagaactgagtgttcaacagttagagtcatctttaaaccttcagtagaaggacagtttgaaaatcattgcaatattttcttcagtctttttttaggttttgtgaattacgcagtttaatatttttgtttaatcttagaaaattgttgtacatagtgtttcctaataatttatttgtgctctgtactgattattgtattttctcacatttatgttaaattttattagtaagattattttctctatttatcagttttgtaaaatgttaaaaattcataaaagccaactgactattggctttaaactaccaataatttagttgatctctatattattatattactctgttaaaatttaattgtattttttgtaaggttttttttcctcttttatatttgctagtattttataaagtatttgttatttcaaaagaaacaactattggccagttaactttcatgccgctattttcatttcctggtatgcttattgctactttgtttttggtggctaccttattaaaacttttagaaatttcagttt

SEQ ID NO: 936 - DNA, 5923 bp, Homo sapiens
tttaccaattcccttcctgggagttgcggcttccctcgctcggccccactcccgtttaccctttccccagctcccgccttagccaggggcttccccgcctgccgctagggctcgggccgaagcgccgctcagcgccagcctgccgctccccgggctccactttcactttcggtcctgggggagctaggccggcggcagtggtggtggcggcggcgcaagggtgagggcggccccagaaccccaggtaggtagagcaagaagatggtgtttctgcccctcaaatggtcccttgcaaccatgtcatttctactttcctcactgttggctctcttaactgtgtccactccttcatggtgtcagagcactgaagcatctccaaaacgtagtgatgggacaccatttccttggaataaaatacgacttcctgagtacgtcatcccagttcattatgatctcttgatccatgcaaaccttaccacgctgaccttctggggaaccacgaaagtagaaatcacagccagtcagcccaccagcaccatcatcctgcatagtcaccacctgcagatatctagggccaccctcaggaagggagctggagagaggctatcggaagaacccctgcaggtcctggaacacccccctcaggagcaaattgcactgctggctcccgagcccctccttgtcgggctcccgtacacagttgtcattcactatgctggcaatctttcggagactttccacggattttacaaaagcacctacagaaccaaggaaggggaactgaggatactagcatcaacacaatttgaacccactgcagctagaatggcctttccctgctttgatgaacctgccttcaaagcaagtttctcaatcaaaattagaagagagccaaggcacctagccatctccaatatgccattggtgaaatctgtgactgttgctgaaggactcatagaagaccattttgatgtcactgtgaagatgagcacctatctggtggccttcatcatttcagattttgagtctgtcagcaagataaccaagagtggagtcaaggtttctgtttatgctgtgccagacaagataaatcaagcagattatgcactggatgctgcggtgactcttctagaattttatgaggattatttcagcataccgtatcccctacccaaacaagatcttgctgctattcccgactttcagtctggtgctatggaaaactggggactgacaacatatagagaatctgctctgttgtttgatgcagaaaagtcttctgcatcaagtaagcttggcatcacaatgactgtggcccatgaactggcccaccagtggtttgggaacctggtcactatggaatggtggaatgatctttggctaaatgaaggatttgccaaatttatggagtttgtgtctgtcagtgtgacccatcctgaactgaaagttggagattatttctttggcaaatgttttgacgcaatggaggtagatgctttaaattcctcacaccctgtgtctacacctgtggaaaatcctgctcagatccgggagatgtttgatgatgtttcttatgataagggagcttgtattctgaatatgctaagggagtatcttagcgctgacgcatttaaaagtggtattgtacagtatctccagaagcatagctataaaaatacaaaaaacgaggacctgtgggatagtatggcaagtatttgccctacagatggtgtaaaagggatggatggcttttgctctagaagtcaacattcatcttcatcctcacattggcatcaggaaggggtggatgtgaaaaccatgatgaacacttggacactgcagaggggttttcccctaataaccatcacagtgagggggaggaatgtacacatgaagcaagagcactacatgaagggctctgacggcgccccggacactgggtacctgtggcatgttccattgacattcatcaccagcaaatccgacatggtccatcgatttttgctaaaaacaaaaacagatgtgctcatcctcccagaagaggtggaatggatcaaatttaatgtgggcatgaatggctattacattgtgcattacgaggatgatggatgggactctttgactggccttttaaaaggaacacacacagcagtcagcagtaatgatcgggcaagtctcattaacaatgcatttcagctcgtcagcattgggaagctgtccattgaaaaggccttggatttatccctgtacttgaaacatgaaactgaaattatgcccgtgtttcaaggtttgaatgagctgattcctatgtataagttaatggagaaaagagatatgaatgaagtggaaactcaattcaaggccttcctcatcaggctgctaagggacctcattgataagcagacatggacagacgagggctcagtctcagagcgaatgctgcggagtgaactactactcctcgcctgtgtgcacaactatcagccgtgcgtacagagggcagaaggctatttcagaaagtggaaggaatccaatggaaacttgagcctgcctgtcgacgtgaccttggcagtgtttgctgtgggggcccagagcacagaaggctgggattttctttatagtaaatatcagttttctttgtccagtactgagaaaagccaaattgaatttgccctctgcagaacccaaaataaggaaaagcttcaatggctactagatgaaagctttaagggagataaaataaaaactcaggagtttccacaaattcttacactcattggcaggaacccagtaggatacccactggcctggcaatttctgaggaaaaactggaacaaacttgtacaaaagtttgaacttggctcatcttccatagcccacatggtaatgggtacaacaaatcaattctccacaagaacacggcttgaagaggtaaaaggattcttcagctctttgaaagaaaatggttctcagctccgttgtgtccaacagacaattgaaaccattgaagaaaacatcggttggatggataagaattttgataaaatcagagtgtggctgcaaagtgaaaagcttgaacgtatgtaaaaattcctcccttgccaggttcctgttatctctaatcaccaacattttgttgagtgtattttcaaactagagatggctgttttggctccaactggagatacttttttcccttcaactcattttttgactatccctgtgaaaagaatagctgttagtttttcatgaatgggctatcgctaccatgtgttttgttcatcacaggtgttgccctgcaacgtaaacccaagtgttgggttccctgccacagaagaataaagtaccttattcttctcattttatagtttatgcttaagcacccgtgtccaaaaccctgtaccccatgtttatcattcataaactgtttcatcagtctcctcgaaagactctgaatagtcgactactgaacaatgaacacctggatctgagactaagccggacgatgactgggttaaagctctcccggctcacccctccagacccgctgcccatccctcttccttgctccatgcccaggggctgacttgtaaaggccaagtcatcaagctttcttgccctttggatgttggtcagtggggagccggagagctggagctggggtcggaggaggtagtaggtggaggtgttcttccctgattcccttgcgggatgcctcgggctggcctcccctgagggtcttagctccgagaggggaccctcttttccacacagccttctccacctctggattttggtaactgctccctcctcatcccttcaggattagtggcctcagtgggagtctggcttttactagtcctggcggacttgtggtttctacataatgtgctcgcacttttgcaaaaaatctttttatagaaccctcctcagataattctgagtgtcatctatttccctgactggtacagtatctcttctgaaaaagcagagtgcattcaagtctgtaggaaaacccttttcttagggaggtgattttttttctctctctgcttcttatttggcctactttacaatttctaactaactagttattggcatttactgacagtaaattattgcagtcaccaataaatgatagtacattgtgaaacaaaatatttgctcatattagcaaataggacattctttggctttgaagtctttcttttgtgaagacttcacacacggttgcttcagcacacagttgctgctcaggttttatgtatagatgataataatagaaagcacagtttactaacatggtaaaccaacggagttcaagtcaagtcagttaataccctaagaattagattttatttcttattctgaaaacttgctacacagggacttatctaacccatagtgtgctctgttgctgacttgattcaagttgcagcgtgttttgcgctgactctaaggtgcggaaatcctcacacctggcaaaggagaattcaaactgaactttttgaatataaggcaaaaacttcaagataagggaatatgattgatgattggtacgaaaaatgtcaaaatgtgttcccctaatacacgacaaaatagagtgacttctggacataaatctgccatttattaaaccattcactacaacaaataaataggtataaaagtggaattggaatttttatacttatttgttgtagtgaatggtttaataaaaatagaaatcactggtaatttccaccccaaactaaactatttcccttcttttaaaaaaatacacaaccaagattttaatgtaaaatattttgctttaattgtattttatgccttgattaatgaaacatggaaatattgattttcagttttggtcacctgaggaacctatctttgtttgcttttggaaaagcccattttctaaacagatacaatattgccacaacaatgtgcagaaacctttttgataataaaaaattgttctttgcctctaagtggatatttgcaattattttctctctcctaactagactgtaaaaagggctgctttagatcctgtagcttactccagttattagttattaacaaacacccaagtctcgaagatatttctaattaaaaaagaaggcatattcagagttctttttaaataaatgttgtttacttttataggcatctttaaacttctggattttggtatgccatttaaaaatacttccagatacacatggaaattagtaatactgcagccgtatccttgcaaacacatctgtcagtgtcaaaggtttcaaggtttttcttaaaaaaagaaaacaaaaaagcaaacacctatactgcccaaatgggaggattagatacatggttagaaatccctcaggaaaagtgttttttcttttcttgttgctgccttaaaaatagaataatgactatttctgatggatagagacatagcattttaagctggtggtgtgtaaaatcccataggtatgtgcatgactttcagagagtatttgggggggaggttaacaagatgtggtgccatttataagcagtgttattgtttttgcttgccccgctgccacaagtcagctaagtcataacaaaagcttcaaactgatgctaaggaaggccatgccctttggaaacaataaattcccaatctgttttatgttatgtacctgacatcttttcctgcattctctaccaggaaataaagatgaaattaaatatcaaaattctaatcgatgatatcagtgcaatgttcaggaactattcattaagatattagaaaaccattcaaagtggtaggacatcagagcctacttcttacattgctgtgggagaaatgcaggtttcaaatttaatatatatatataatttttttaaaagcagaagtttctttttatatttggtaaacttaagttcc

SEQ ID NO: 937 - DNA, 5327 bp, Homo sapiens
actttcggtcctgggggagctaggccggcggcagtggtggtggcggcggcgcaagggtgagggcggccccagaaccccaggtaggtagagcaagaagatggtgtttctgcccctcaaatggtcccttgcaatcatgtcatttctactttcctcactgttggctctcttaactgtgtccactccttcatggtgtcagagcactgaagcatctccaaaacgtagtgatgggacaccatttccttggaataaaatacgacttcctgagtacgtcatcccagttcattatgatctcttgatccatgcaaaccttaccacgctgaccttctggggaaccacgaaagtagaaatcacagccagtcagcccaccagcaccatcatcctgcatagtcaccacctgcagatatctagggccaccctcaggaagggagctggagagaggctatcggaagaacccctgcaggtcctggaacacccccctcaggagcaaattgcactgctggctcccgagcccctccttgtcgggctcccgtacacagttgtcattcactatgctggcaatctttcggagactttccacggattttacaaaagcacctacagaaccaaggaaggggaactgaggatactagcatcaacacaatttgaacccactgcagctagaatggcctttccctgctttgatgaacctgccttcaaagcaagtttctcaatcaaaattagaagagagccaaggcacctagccatctccaatatgccattggtgaaatctgtgactgttgctgaaggactcatagaagaccattttgatgtcactgtgaagatgagcacctatctggtggccttcatcatttcagattttgagtctgtcagcaagataaccaagagtggagtcaaggtttctgtttatgctgtgccagacaagataaatcaagcagattatgcactggatgctgcggtgactcttctagaattttatgaggattatttcagcataccgtatcccctacccaaacaagatcttgctgctattcccgactttcagtctggtgctatggaaaactggggactgacaacatatagagaatctgctctgttgtttgatgcagaaaagtcttctgcatcaagtaagcttggcatcacagtgactgtggcccatgaactggcccaccagtggtttgggaacctggtcactatggaatggtggaatgatctttggctaaatgaaggatttgccaaatttatggagtttgtgtctgtcagtgtgacccatcctgaactgaaagttggagattatttctttggcaaatgttttgacgcaatggaggtagatgctttaaattcctcacaccctgtgtctacacctgtggaaaatcctgctcagatccgggagatgtttgatgatgtttcttatgataagggagcttgtattctgaatatgctaagggagtatcttagcgctgacgcatttaaaagtggtattgtacagtatctccagaagcatagctataaaaatacaaaaaacgaggacctgtgggatagtatggcaagtatttgccctacagatggtgtaaaagggatggatggcttttgctctagaagtcaacattcatcttcatcctcacattggcatcaggaaggggtggatgtgaaaaccatgatgaacacttggacactgcagaggggttttcccctaataaccatcacagtgagggggaggaatgtacacatgaagcaagagcactacatgaagggctctgacggcgccccggacactgggtacctgtggcatgttccattgacattcatcaccagcaaatccaacatggtccatcgatttttgctaaaaacaaaaacagatgtgctcatcctcccagaagaggtggaatggatcaaatttaatgtgggcatgaatggctattacattgtgcattacgaggatgatggatgggactctttgactggccttttaaaaggaacacacacagcagtcagcagtaatgatcgggcaagtctcattaacaatgcatttcagctcgtcagcattgggaagctgtccattgaaaaggccttggatttatccctgtacttgaaacatgaaactgaaattatgcccgtgtttcaaggtttgaatgagctgattcctatgtataagttaatggagaaaagagatatgaatgaagtggaaactcaattcaaggccttcctcatcaggctgctaagggacctcattgataagcagacatggacagacgagggctcagtctcagagcaaatgctgcggagtgaactactactcctcgcctgtgtgcacaactatcagccgtgcgtacagagggcagaaggctatttcagaaagtggaaggaatccaatggaaacttgagcctgcctgtcgacgtgaccttggcagtgtttgctgtgggggcccagagcacagaaggctgggattttctttatagtaaatatcagttttctttgtccagtactgagaaaagccaaattgaatttgccctctgcagaacccaaaataaggaaaagcttcaatggctactagatgaaagctttaagggagataaaataaaaactcaggagtttccacaaattcttacactcattggcaggaacccagtaggatacccactggcctggcaatttctgaggaaaaactggaacaaacttgtacaaaagtttgaacttggctcatcttccatagcccacatggtaatgggtacaacaaatcaattctccacaagaacacggcttgaagaggtaaaaggattcttcagctctttgaaagaaaatggttctcagctccgttgtgtccaacagacaattgaaaccattgaagaaaacatcggttggatggataagaattttgataaaatcagagtgtggctgcaaagtgaaaagcttgaacatgatcctgaagctgacgcaacaggatgaaaatccatcagaatctcagactacagcactaaatatgctttgatgctacatcaaacggaatggaagcatagctgacttcgctaaagttacttcatctccatctagcaaatgaggcactgttctcaaccaaaggagatggggatctggtttagggcaatccctttataatttgatgtgctgtggtctccttggtaatgtataatttggtattgcacaggtgattagtcaaggaagtctggaaaagctttggtcccacagccttgcctcacagcatgtaaataattaaaacaatattgatgctgaggttcttctactgctagtatgaaagtgacaaatttttactggtgtgaattgggaagaaaacaatgctattccatgacgtttgtaaaatgtttgtaaaagctcaaacatgacgattccataaaataaacttgaggttaaataatgggtagtaaattatagaatgtataagaaaaaatataaaggagaaaatcaattatcaggaaagctaaagaacttttcaaatctagtaatttgaatatagacacaatgcactttattgcactttcaattcttataaagcaacaataatattaaggtccttgactatgtgtacaatgttttcacatatatagtttcatttaatcatttcaaagttaatctctgccatctcgctaaatcatcagtctcggctcttctgaaatagaaggtgcctgatcttcctaataattctgcctattttcatttgctttaaacaggcgccctattttctttctagttgtggctgcgcaaaaacatttatctcccaaataagatgtgctgcttaccgaggtatcacggggtggggctccagcttgggtcgttgaagctggggtttgggaaaccacttcagagatggcagcagcaagtttagcatcttcaaatttcttttattgaaaaaaattttattagtaacatgttgtatataaaattatgagcacaatgccatcacttaactataactcttaaagatagcttaatgactgtttattctcttgaccaaatagactcataataacatataattttaaaagaaatttaaattctttcttctctattgtattattttatacaatttgctatttctatttccttctcatattgattattctaaatactatgcaataatataacttagagttccacggtttgtttacacatttcctgttgtacatttaggttattcaaagttttcagctcttttaaaattgctctgaataagttctagtgagtgagttatggtgctggctatattttgctaaactgccctctcaaatgttgctaggaattcatactgcgaaaagcaatgaataagcatgcctgttttcccatggccttgcttgccagaatttgacttttattatgataatcagtgtaaaatgatatactactattgcttgtatattgtggtatacggtgtcaggtttcagggttttttttcaacgttaaatattctagaaactttctgaaataatttctgtttaaaaatattgaatatttgcttcatttcaaatactcccttttgacaaaaaaacttaggtataactgttgatgaaaaaccagaaaaaagtccagaactctttggtgactccaactatggatagcttattttgaaaaaggagaattgcaaattttaccaaaagatggagaaaagcacattaaaaagataccaacattcagaaattcatttcagcatgttattattggaaattatttaaactaatttagataactataagatacttattgtccatttataccctgtaaagccgttttagaatgtaatattttaggtaatccaaaatgtactaaattaaattcatttttagttatgagaaatctttgcttatatgacaaatgaaaagaataacaagttgtcaaatgaaaagaatgacattgaaacatttgtattgtctcttcttaaactatcttattgacttattatttaagccttttaatactaagtatgaaacaacctatggtctggaaatttgtatcgcaaagctatatgtgcatatgttatttaattcatctaacgctacacaaaagcataaaataatgatttttcactctctttaaaaatactaaatcatttatgtccatttctcaattttttcattgatctatgctttgagtttgctttctcaacattattgtattttccacttattattactgtataacatatgctagtgtttagttggattaatcttacctaaaagtactgaaaaatgctttttagtactttttcatattttatacatttattttccgaatgtatcattgaataattttattgagttataaaagtatcttattgctatttaataaaaaattaacacat

SEQ ID NO: 938 - DNA, 1746 bp, Homo sapiens
ccctgacctatgatggacgtattctctagccaattactagacggtattctcagacgggccgcctccattgccaatgaaatcttccagcggggtcgcggtaggcgggccgtggaccctctggtataaggcggtcccgggggagtgaggagaaagggggggtcttggcggccggaggaggagtaggtgcgggtgaagatggcggcagccgaggccgcgaactgcatcatggagaattttgtagccaccttggctaatgggatgagcctccagccgcctcttgaagaagtgtcctgtggccaggcggaaagcagtgagaagcccaacgctgaggacatgacatccaaagattactactttgactcctacgcacactttggcatccacgaggagatgctgaaggacgaggtgcgcaccctcacttaccgcaactccatgtttcataaccggcacctcttcaaggacaaggtggtgctggacgtcggctcgggcaccggcatcctctgcatgtttgctgccaaggccggggcccgcaaggtcatcgggatcgagtgttccagtatctctgattatgcggtgaagatcgtcaaagccaacaagttagaccacgtggtgaccatcatcaaggggaaggtggaggaggtggagctcccagtggagaaggtggacatcatcatcagcgagtggatgggctactgcctcttctacgagtccatgctcaacaccgtgctctatgcccgggacaagtggctggcgcccgatggcctcatcttcccagaccgggccacgctgtatgtgacggccatcgaggaccggcagtacaaagactacaagatccactggtgggagaacgtgtatggcttcgacatgtcttgcatcaaagatgtggccattaaggagcccctagtggatgtcgtggaccccaaacagctggtcaccaacgcctgcctcataaaggaggtggacatctataccgtcaaggtggaagacctgaccttcacctccccgttctgcctgcaagtgaagcggaatgactacgtgcacgccctggtggcctacttcaacatcgagttcacacgctgccacaagaggaccggcttctccaccagccccgagtccccgtacacgcactggaagcagacggtgttctacatggaggactacctgaccgtgaagacgggcgaggagatcttcggcaccatcggcatgcggcccaacgccaagaacaaccgggacctggacttcaccatcgacctggacttcaagggccagctgtgcgagctgtcctgctccaccgactaccggatgcgctgaggcccggctctcccgccctgcacgagcccaggggctgagcgttcctaggcggtttcggggctcccccttcctctccctccctcccgcagaagggggttttaggggcctgggctggggggatggggagggcacatcgtgactgtgtttttcataacttatgtttttatatggttgcatttacgccaataaatcctcagctggggtctggctttgtttcctgggggcaaaggaggtttggggttcctttcgcaggtactgcagtgccagcctcagcagtggggggaccggccttggcacctgctggtggctgccattctgtggatctgcgtctcccgtcccccgtctctaggcctcttgctccccttccttggttccttctcggggtccctgtcctccacagctgtctctcagggtctttgtccaactcttttcatc

SEQ ID NO: 939 - DNA, 1685 bp, Homo sapiens
ctatgatggacgtattctctagccaattactagacggtattctcagacgggccgcctccattgccaatgaaatcttccagcggggtcgcggtaggcgggccgtggaccctctggtataaggcggtcccgggggagtgaggagaaagggggggtcttggcggccggaggaggagtaggtgcgggtgaagatggcggcagccgaggccgcgaactgcatcatggaggtgtcctgtggccaggcggaaagcagtgagaagcccaacgctgaggacatgacatccaaagattactactttgactcctacgcacactttggcatccacgaggagatgctgaaggacgaggtgcgcaccctcacttaccgcaactccatgtttcataaccggcacctcttcaaggacaaggtggtgctggacgtcggctcgggcaccggcatcctctgcatgtttgctgccaaggccggggcccgcaaggtcatcgggatcgagtgttccagtatctctgattatgcggtgaagatcgtcaaagccaacaagttagaccacgtggtgaccatcatcaaggggaaggtggaggaggtggagctcccagtggagaaggtggacatcatcatcagcgagtggatgggctactgcctcttctacgagtccatgctcaacaccgtgctctatgcccgggacaagtggctggcgcccgatggcctcatcttcccagaccgggccacgctgtatgtgacggccatcgaggaccggcagtacaaagactacaagatccactggtgggagaacgtgtatggcttcgacatgtcttgcatcaaagatgtggccattaaggagcccctagtggatgtcgtggaccccaaacagctggtcaccaacgcctgcctcataaaggaggtggacatctataccgtcaaggtggaagacctgaccttcacctccccgttctgcctgcaagtgaagcggaatgactacgtgcacgccctggtggcctacttcaacatcgagttcacacgctgccacaagaggaccggcttctccaccagccccgagtccccgtacacgcactggaagcagacggtgttctacatggaggactacctgaccgtgaagacgggcgaggagatcttcggcaccatcggcatgcggcccaacgccaagaacaaccgggacctggacttcaccatcgacctggacttcaagggccagctgtgcgagctgtcctgctccaccgactaccggatgcgctgaggcccggctctcccgccctgcacgagcccaggggctgagcgttcctaggcggtttcggggctcccccttcctctccctccctcccgcagaagggggttttaggggcctgggctggggggatggggagggcacatcgtgactgtgtttttcataacttatgtttttatatggttgcatttacgccaataaatcctcagctggggtctggctttgtttcctgggggcaaaggaggtttggggttcctttcgcaggtactgcagtgccagcctcagcagtggggggaccggccttggcacctgctggtggctgccattctgtggatctgcgtctcccgtcccccgtctctaggcctcttgctccccttccttggttccttctcggggtccctgtcctccacagctgtctctcagggtctttgtccaactcttttcatc

SEQ ID NO: 940 - DNA, 1316 bp, Homo sapiens
gtgggcagccgaggccgcgaactgcatcatggagaattttgtagccaccttggctaatgggatgagcctccagccgcctcttgaagaagtgtcctgtggccaggcggaaagcagtgagaagcccaacgctgaggacatgacatccaaagattactactttgactcctacgcacactttggcatccacgaggagatgctgaaggacgaggtgcgcaccctcacttaccgcaactccatgtttcataaccggcacctcttcaaggacaaggtggtgctggacgtcggctcgggcaccggcatcctctgcatgtttgctgccaaggccggggcccgcaaggtcatcgggatcgtgtgttccagtatctctgattatgcggtgaagatcgtcaaagccaacaagttagaccacgtggtgaccatcatcaaggggaaggtggaggaggtggagctcccagtggagaaggtggacatcatcatcagcgagtggatgggctactgcctcttctacgagtccatgctcaacaccgtgctctatgcccgggacaagtggctggcgcccgatggcctcatcttcccagaccgggccacgctgtatgtgacggccatcgaggaccggcagtacaaagactacaagatccactggtgggagaacgtgtatggcttcgacatgtcttgcatcaaagatgtggccattaaggagcccctagtggatgtcgtggaccccaaacagctggtcaccaacgcctgcctcataaaggaggtggacatctataccgtcaaggtggaagacctgaccttcacctccccgttctgcctgcaagtgaagcggaatgactacgtgcacgccctggtggcctacttcaacatcgagttcacacgctgccacaagaggaccggcttctccaccagccccgagtccccgtacacgcactggaagcagacggtgttctacatggaggactacctgaccgtgaagacgggcgaggagatcttcggcaccatcggcatgcggcccaacgccaagaacaaccgggacctggacttcaccatcgacctggacttcaagggccagctgtgcgagctgtcctgctccaccgactaccggatgcgctgaggcccggctctcccgccctgcacgagcccaggggctgagcgttcctaggcggtttcggggctcccccttcctctccctccctcccgcagaagggggttttaggggcctgggctggggggatggggagggcacatcgtgactgtgtttttcataacttatgtttttatatggttgcatttacgccaataaatcctcagctggg

SEQ ID NO: 941 - DNA, 1568 bp, Homo sapiens
agagttggcaaacccctgacctatgatggacgtattctctagccaattactagacggtattctcagacgggccgcctccattgccaatgaaatcttccagcggggtcgtgtcctgtggccaggcggaaagcagtgagaagcccaacgctgaggacatgacatccaaagattactactttgactcctacgcacactttggcatccacgaggagatgctgaaggacgaggtgcgcaccctcacttaccgcaactccatgtttcataaccggcacctcttcaaggacaaggtggtgctggacgtcggctcgggcaccggcatcctctgcatgtttgctgccaaggccggggcccgcaaggtcatcgggatcgagtgttccagtatctctgattatgcggtgaagatcgtcaaagccaacaagttagaccacgtggtgaccatcatcaaggggaaggtggaggaggtggagctcccagtggagaaggtggacatcatcatcagcgagtggatgggctactgcctcttctacgagtccatgctcaacaccgtgctctatgcccgggacaagtggctggcgcccgatggcctcatcttcccagaccgggccacgctgtatgtgacggccatcgaggaccggcagtacaaagactacaagatccactggtgggagaacgtgtatggcttcgacatgtcttgcatcaaagatgtggccattaaggagcccctagtggatgtcgtggaccccaaacagctggtcaccaacgcctgcctcataaaggaggtggacatctataccgtcaaggtggaagacctgaccttcacctccccgttctgcctgcaagtgaagcggaatgactacgtgcacgccctggtggcctacttcaacatcgagttcacacgctgccacaagaggaccggcttctccaccagccccgagtccccgtacacgcactggaagcagacggtgttctacatggaggactacctgaccgtgaagacgggcgaggagatcttcggcaccatcggcatgcggcccaacgccaagaacaaccgggacctggacttcaccatcgacctggacttcaagggccagctgtgcgagctgtcctgctccaccgactaccggatgcgctgaggcccggctctcccgccctgcacgagcccaggggctgagcgttcctaggcggtttcggggctcccccttcctctccctccctcccgcagaagggggttttaggggcctgggctggggggatggggagggcacatcgtgactgtgtttttcataacttatgtttttatatggttgcatttacgccaataaatcctcagctggggtctggctttgtttcctgggggcaaaggaggtttggggttcctttcgcaggtactgcagtgccagcctcagcagtggggggaccggccttggcacctgctggtggctgccattctgtggatctgcgtctcccgtcccccgtctctaggcctcttgctccccttccttggttccttctcggggtccctgtcctccacagctgtctctcagggtctttgtccaactcttttcatc

SEQ ID NO: 942 - DNA, 1515 bp, Homo sapiens
aattttgtagccaccttggctaatgggatgagcctccagccgcctcttgaagaagtgtcctgtggccaggcggaaagcagtgagaagcccaacgctgaggacatgacatccaaagattactactttgactcctacgcacactttggcatccacgaggagatgctgaaggacgaggtgcgcaccctcacttaccgcaactccatgtttcataaccggcacctcttcaaggacaaggtggtgctggacgtcggctcgggcaccggcatcctctgcatgtttgctgccaaggccggggcccgcaaggtcatcgggatcgagtgttccagtatctctgattatgcggtgaagatcgtcaaagccaacaagttagaccacgtggtgaccatcatcaaggggaaggtggaggaggtggagctcccagtggagaaggtggacatcatcatcagcgagtggatgggctactgcctcttctacgagtccatgctcaacaccgtgctctatgcccgggacaagtggctggcgcccgatggcctcatcttcccagaccgggccacgctgtatgtgacggccatcgaggaccggcagtacaaagactacaagatccactggtgggagaacgtgtatggcttcgacatgtcttgcatcaaagatgtggccattaaggagcccctagtggatgtcgtggaccccaaacagctggtcaccaacgcctgcctcataaaggaggtggacatctataccgtcaaggtggaagacctgaccttcacctccccgttctgcctgcaagtgaagcggaatgactacgtgcacgccctggtggcctacttcaacatcgagttcacacgctgccacaagaggaccggcttctccaccagccccgagtccccgtacacgcactggaagcagacggtgttctacatggaggactacctgaccgtgaagacgggcgaggagatcttcggcaccatcggcatgcggcccaacgccaagaacaaccgggacctggacttcaccatcgacctggacttcaagggccagctgtgcgagctgtcctgctccaccgactaccggatgcgctgaggcccggctctcccgccctgcacgagcccaggggctgagcgttcctaggcggtttcggggctcccccttcctctccctccctcccgcagaagggggttttaggggcctgggctggggggatggggagggcacatcgtgactgtgtttttcataacttatgtttttatatggttgcatttacgccaataaatcctcagctggggtctggctttgtttcctgggggcaaaggaggtttggggttcctttcgcaggtactgcagtgccagcctcagcagtggggggaccggccttggcacctgctggtggctgccattctgtggatctgcgtctcccgtcccccgtctctaggcctcttgctccccttccttggttccttctcggggtccctgtcctccacagctgtctctcagggtctttgtccaactcttttcatc

SEQ ID NO: 943 - DNA, 1019 bp, Homo sapiens
atggcggccgccgaggtcgtgaactgcatcatggaggtgtcctgtggccaggcggaaagcagcgagaagccgaacgtcgagggcatgacgtccaaagattactactttgactcctacgcccacttcggcaactccatgtttcacaaccgccacctctttaaagacaaggtggtgctggatgtgggctcggacacaagcatcctctgcatgttcgccgccaaggccgggcccgcaaggtcatcggcatcgagtgttccagtagctctgattatgcggtgaagattgtcaaagccaacaagttagaccacttggtgaccatcaccaaggggaaggtggaggagatagagctcccggtggaaaaggtgaacatcatcatcagcaagtggatgggctaactgcctcttctacgagtccatgctcaacactgtgctctatgcccggacaagtggctggcgcccaatagcctcatcttcccagaacgggccacactgtatgtgacggccaccgaggaccggcagtacaaagactacaagatccactggtgggagaacgtttatggcttcgatatatcttgcatcaaagatgtggccatcaaggaaaccctagtggatgtggtggacctcaaacagctggttaccaacgcctgcctcataaaggaggtagacatctacaccgtcaaggtggaagacctgaccttcacctccccgttctgcctgcaagtgaagcagaatgactacgtgcacacccaggtggcctacttcaacatcgagtttacgcactgccacaagaggaccggagggaccggcttctccaccatacccgagtccctgtacacgcactggaagcagacggtgttctacatggaggactacctgaccttgaagacgggcgaggagatcttcggcaccatcggcatgcggcccaacgccaagaactgggaccgggacttcaccatcaacctagatttcaggggccatctgtgcgacctgtcctgctccacagactacaggatgtgctga

SEQ ID NO: 944 - DNA, 1316 bp, Homo sapiens; identical to SEQ ID NO: 940

SEQ ID NO: 945 - DNA, 6340 bp, Homo sapiens
gtggctgagaagaaggaggcctgagagcgacatgtccccggcggctcaggcggagcggcccgtggcgctgtttttctgagtccggggtggcctggcagccggccgaggacgagggtcggcgggggctgcccccgtggtggtggccgccatgctgggagcctgggcggttgagggaaccgctgtggcgctcctgcgactgctgctgctgctgctgccgccggcgatccggggacccgggctcggcgtggccggcgtggccggcgcggcgggggccgggctgcccgagagcgtcatttgggcggtcaacgcgggtggagaggcgcatgtggacgtgcacgggatccacttccgcaaggaccctttggaaggccgggtgggccgagcctcagactatggcatgaaactgccaatcctgcgttccaaccctgaggaccagatcctgtatcaaactgagcggtacaatgaggagacctttggctacgaagtgcccatcaaagaggagggggactacgtgctggtcttgaaatttgcagaggtctactttgcacagtcccagcaaaaggtatttgatgtacgattgaatggccacgtcgtggtgaaggacttggatatctttgatcgtgttgggcatagcacagctcacgatgaaattatacctatgagcatcagaaaggggaagctgagtgtccagggggaggtgtccaccttcacagggaaactctacattgagtttgtcaaggggtactatgacaatcccaaggtctgtgcactctacatcatggctgggacagtggatgatgtaccaaagcttcagcctcatccgggattggagaagaaagaagaggaagaagaagaagaagaatatgatgaagggtctaatctcaaaaaacagaccaataagaaccgggtgcagtcaggcccccgcacacccaacccctatgcctcggacaacagcagcctcatgtttcccatcctggtggccttcggagtcttcattccaaccctcttctgcctctgccggttgtgagaacaaatgactatcctgaacagggtggaggggtgtgggaaagaaaccagccatattggttttggtttctgtatttttcacaatgattaatgaacaaaaacaaagagaaaaaaacacacatcaattaaaggagacaaaaagaggcagagcgagtagagagcagccctcattcaccacctggtcccagacgtgcttcagtcctcgtcctctctttgtggctggctcccagccttctctttcctcttgaggatacttagggtaaactggatccttcctgctcaaggatcctcatttgtatacctagtggaaaggactctgaactcagaggagtcactgttcctttttttaggttagaaattaacagcagggaaatgccatcttattacctgagacgaccagcactgggagttaggtacggtctgaagttatgtctagataagacttcagacgtcctgggattgaaagaatgtgtgtgaaggggtagaatttgtgcggtaaagacttaaaaaaaaaagtagggagattaaaaaaaaagaaagaaaatgcttccttatctggaagcctttctggattaatccagtgatggtcccacctttagtgtttgagctttgtcattgcttgtctccctggcatgtgccagttatagactgtccagcatccaagacgtttcggttatgtcgggtcctcagatcgcctctgacttgttaccacaacaaatcattttgatttcagtgcctgttggggacttgatttcttctcagttttgtttgtttgtttgtttccttaatctggctcatttgaaatttcttctccctctcaaccatcccactaagttatagccaagaagggaaggagacacggggatttggggttctctgcttgaatgtcttctcctttaccacctcaccttgttggtacctccctccctggatctctgagccagcagccaggaggacctgacccagcagttctttactggcccctttgtagggccttgctgccagggggcagggatgctttccagcctgcagcaacagaacacttgaccttaaaagtctcttctggtctttggattagaaaaggcttatgttagcatagcttaagagcaacctcagagatttgagccctactaagtgactgaccactgtttagagtgtctggtatctgatgttcatttattcccatgttcttgtgtgtcacagttcagccagttttggtttatgcctagagctacttcaaggaactagactaattagctatataggcccagcgatgcttcttattgatcttaatagtatgcccctccttcccctgtcctttcatttctctatccaagtagcagtcaggttcttggtgtgatgggactgaaagaattccagtcagccagagccttggcagctctgaagctaaccttagcatctaagtgtcgatcttgaattccctgaaaaaatttctataggaaatgaagcttccctggtcccctcctttctggccattgtcatccatttcccagttagggcaacaatgaaggaggacccagccaagctagaaggaattttgtggatgggagacagcaggattagcttcagcttgggctggagcagtcaatataggatctcaggccaggcccgcttttctagaatgtgtttaattttgagtttgctttattagatatgttttttaagagctctgtatatttgaactgctccttatgtgacaaaataggtagctcttgggctcatgtcctgggttttggctctttaatgattactccaggccagcatttagtcgtttgagaattgtagcctgttgttttcgctgtgacttgggtctcagtgctagggtattgagtcaggcagctggagggttgtggcccgaggctgcagtcagaggtatacttcccatagtgcttcacacagctcccctgcttctaaaggataaggtactgtagccttggtcctggggaccacctgcctggggcagtggacatcctaactaaacaggcttctggcagtagctttggttcctatcccatcgaaattccccaaagccctgggccactgccattgggttagtcaagatgaaggaggaggactggctgcctccattttgccttgtttgttagtttgcctgggtctgtctgaggaaggagggggtcccgccttccacctcaacacatcccttcagtgactcagagtctcagaaggaaaccctgactcctggggccatttcctaatggtactgtaagccaagcagctttgcttctgcctctgtttccaagcccacccttttcccctgagctcagggttagggatgggcgctttcctctctggttgtgaacgaaaggaaggaacatctttctatggctaacaaaaactaaaggggaagtgaggaaacaggaagaagtatggtgggggctggggtagactcccctggagccaagcctatccagctaacaagagctccctggggctggtcacagctggctcatgatgctgaacttgaaagtttttttgtttttgtttttgttttgtggctcctccaagatataggtacatgaagtttaggttaaaggggtgggattctttatttttatttttgtattgtatgtgtcaagaattactctgttgttcaccttttgctttttgcactgtttgttctcttatctgtattttgagcttagtgctaggactgagaggctgcaccatagggaatgtatgggagatggtgaggggtgccagtgaggggtgcgtggaggagaggcctgggctcctctactggatctacactctgtcccaggtttttagatcccactgagcccagctgactgaaaacaaggacagtcagggtgaaacttcttttgccagaagtgtggcctgagttgaatttctgggaggatgacgcagatgtctgctgcagagctgggctgagagttctgcagtctagctctgacttaggtcaggggcctgttggtctctcattggacgtttttgggtctcactcatgcttactgaaacattgtgccaagaaactctgtgggatttgtgtcccttaaaccagactcacttttctgaaaaatctccattgttgaggagaggctgctcaatcgacaccccgagttctcatgactgggaagatagttttcttcaggtgtcaatggcgttagactcccaggaagactagccctgcccacagggccacctgttggtttgagagcgtgttcgtgttctcttgccctccctgcctaagagctactgggatcacgttagcgggcatttaggctttgatgagagggcacagtttgagttaggtttacctccccctttctgtgcctgggaactgtttggtccagctttagaactgtggttttgacttccttatctcttgggagaagcttctgttttaaggaatttctcttccttcttctcctgcctctagcctctcctggaaaggcctggatatggtttctaaaatctcagctgagaacttcagaaaacagcagcagtattttccttttcctagtgctaaaatccctttccctagaaattggctcaccttgggaaacccagggaaagaatcagcaggttctctgccctccctaggggttggggaaggacccaccccggtcagcacagtgccttttcctctcctgctctgagccagggtggggcattccctctagattcaggtttgggcaggggtcctatagtccctgccatggggctgcttccctgtcccttccctcccctttgctggcctactctggcataattcaagtgtcttcttgccttggggatccttagtggcatcaaatggcaacatggaatattgtcctccatgcccctccagaaggacctaggagagtaggtgagctttccaaagtgagagacgaatctttctttctttttttttttaaagggcaggatgggtatgctttgggctttctccttctgtggccccggaggaaggagagactgaggcaaggcaaagtgatagtacactgaagcagaaccggaaacacccaggaactgttcagaaatctcagaagaaatctgcttctcttcgatggaaagatataattaacgatcaaagagctctaagaaaattgcaaagaagccttaatgttcaagctttagaaagatcagagcaatttttctctttcagtccaaactaagactctctgtatttaaatctctctggggcaagagggctagatttcctcattttgttatgagactagattggtaccagtagatcagctgcctagcgagggcaggtttcttctttgcatctgtgtggcttgcttccagtctggcctgtcctttccagctgccttttgtctagcctgctatggggggccagattatcttgataagagcaggtgatttggggactagctgggttggcaggaaaagagcaggatggatctcttgggacaggttcccccaggagtataaacacaaggagccaggattgtgctggcagccaaggaaacagtagtgcctgtttgagttggcagagagggccttggcacctcttgcatccaggcagtcttgtgagatgggggcacatagcactggggaaagcagaactccattctcacctctattttgagcttcagtgctttatttcagtatgaggaaaaacaacaacaaactgaagtgcgctttccgtcctttcaaaggacaactgtcgggaagggagagccgagttgcgaggtaggaggggagcactggcagggagagacattcttgactcctctcttccctggtgtgttgtgatccagggaatgaaaagaaatttgaccctggattggttctctccttggacttaaggaatcttaccttttccttccacaaagttctcccaggcaaggaccagctgcccattctgagcccagggcagcctcttcaaccattattggtctaacctggcttgtcaggaaaccaagcccacccttccacattgggcctggctgctctattctgtaccaagtactggagaaaaagcatcaagttcttagcccttgtagcttctaccctagtttcccatcctctctctgtggaggccaaaccaactctttgccagcagccacaacatgcattgacagcggcacagtgagatataactgatgggctttgaacctggttggccggggaagctgtaggggtggatagagctggctttccttctgggctgtctccatctgaccctaccccttccatgtcccaccccactcccaccaaaaagtacaaaatcaggatgtttttcactgtccattgctttgtgttttaataaacaatttgcagtgac

SEQ ID NO: 946 - DNA, 6367 bp, Homo sapiens
cccgtggctgagaagaaggaggcctgagagcgacatgtccccggcggctcaggcggagcggcccgtggcgctgtttttctgagtccggggtggcctggcagccggccgaggacgagggtcggcgggggctgcccccgtggtggtggccgccatgctgggagcctgggcggttgagggaaccgctgtggcgctcctgcgactgctgctgctgctgctgccgccggcgatccggggacccgggctcggcgtggccggcgtggccggcgcggcgggggccgggctgcccgagagcgtcatttgggcggtcaacgcgggtggagaggcgcatgtggacgtgcacgggatccacttccgcaaggaccctttggaaggccgggtgggccgagcctcagactatggcatgaaactgccaatcctgcgttccaaccctgaggaccagatcctgtatcaaactgagcggtacaatgaggagacctttggctacgaagtgcccatcaaagaggagggggactacgtgctggtcttgaaatttgcagaggtctactttgcacagtcccagcaaaaggtatttgatgtacgattgaatggccacgtcgtggtgaaggacttggatatctttgatcgtgttgggcatagcacagctcacgatgaaattatacctatgagcatcagaaaggggaagctgagtgtccagggggaggtgtccaccttcacagggaaactctacattgagtttgtcaaggggtactatgacaatcccaaggtctgtgcactctacatcatggctgggacagtggatgatgtaccaaagcttcagcctcatccgggattggagaagaaagaagaggaagaagaagaagaagaatatgatgaagggtctaatctcaaaaaacagaccaataagaaccgggtgcagtcaggcccccgcacacccaacccctatgcctcggacaacagcagcctcatgtttcccatcctggtggccttcggagtcttcattccaaccctcttctgcctctgccggttgtgagaacaaatgactatcctgaacagggtggaggggtgtgggaaagaaaccagccatattggttttggtttctgtatttttcacaatgattaatgaacaaaaacaaagagaaaaaaacacacatcaattaaaggagacaaaaagaggcagagcgagtagagagcagccctcattcaccacctggtcccagacgtgcttcagtcctcgtcctctctttgtggctggctcccagccttctctttcctcttgaggatacttagggtaaactggatccttcctgctcaaggatcctcatttgtatacctagtggaaaggactctgaactcagaggagtcactgttcctttttttaggttagaaattaacagcagggaaatgccatcttattacctgagacgaccagcactgggagttaggtacggtctgaagttatgtctagataagacttcagacgtcctgggattgaaagaatgtgtgtgaaggggtagaatttgtgcggtaaagacttaaaaaaaaaagtagggagattaaaaaaaaagaaagaaaatgcttccttatctggaagcctttctggattaatccagtgatggtcccacctttagtgtttgagctttgtcattgcttgtctccctggcatgtgccagttatagactgtccagcatccaagacgtttcggttatgtcgggtcctcagatcgcctctgacttgttaccacaacaaatcattttgatttcagtgcctgttggggacttgatttcttctcagttttgtttgtttgtttgtttccttaatctggctcatttgaaatttcttctccctctcaaccatcccactaagttatagccaagaagggaaggagacacggggatttggggttctctgcttgaatgtcttctcctttaccacctcaccttgttggtacctccctccctggatctctgagccagcagccaggaggacctgacccagcagttctttactggcccctttgtagggccttgctgccagggggcagggatgctttccagcctgcagcaacagaacacttgaccttaaaagtctcttctggtctttggattagaaaaggcttatgttagcatagcttaagagcaacctcagagacttgagccctactaagtgactgaccactgtttagagtgtctggtatctgatgttcatttattcccatgttcttgtgtgtcacagttcagccagttttggtttatgcctagagctacttcaaggaactagactaattagctatataggcccagcgatgcttcttattgatcttaatagtatgcccctccttcccctgtcctttcatttctctatccaagtagcagtcaggttcttggtgtgatgggactgaaagaattccagtcagccagagccttggcagctctgaagctaaccttagcatctaagtgtcgatcttgaattccctgaaaaaatttctataggaaatgaagcttccctggtcccctcctttctggccattgtcatccatttcccagttagggcaacaatgaaggaggacccagccaagctagaaggaattttgtggatgggagacagcaggattagcttcagcttgggctggagcagtcaatataggatctcaggccaggcccgcttttctagaatgtgtttaattttgagtttgctttattagatatgttttttaagagctctgtatatttgaactgctccttatgtgacaaaataggtagctcttgggctcatgtcctgggttttggctctttaatgattactccaggccagcatttagtcgtttgagaattgtagcctgttgttttcgctgtgacttgggtctcagtgctagggtattgagtcaggcagctggagggttgtggcccgaggctgcagtcagaggtatacttcccatagtgcttcacacagctcccctgcttctaaaggataaggtactgtagccttggtcctggggaccacctgcctggggcagtggacatcctaactaaacaggcttctggcagtagctttggttcctatcccatcgaaattccccaaagccctgggccactgccattgggttagtcaagatgaaggaggaggactggctgcctccattttgccttgtttgttagtttgcctgggtctgtctgaggaaggagggggtcccgccttccacctcaacacatcccttcagtgactcagagtctcagaaggaaaccctgactcctggggccatttcctaatggtactgtaagccaagcagctttgcttctgcctctgtttccaagcccacccttttcccctgagctcagggttagggatgggcgctttcctctctggttgtgaacgaaaggaaggaacatctttctatggctaacaaaaactaaaggggaagtgaggaaacaggaagaagtatggtgggggctggggtagactcccctggagccaagcctatccagctaacaagagctccctggggctggtcacagctggctcatgatgctgaacttgaaagtttttttgtttttgtttttgttttgtggctcctccaagatataggtacatgaagtttaggttaaaggggtgggattctttatttttatttttgtattgtatgtgtcaagaattactctgttgttcaccttttgctttttgcactgtttgttctcttatctgtattttgagcttagtgctaggactgagaggctgcaccatagggaatgtatgggagatggtgaggggtgccagtgaggggtgcgtggaggagaggcctgggctcctctactggatctacactctgtcccaggtttttagatcccactgagcccagctgactgaaaacaaggacagtcagggtgaaacttcttttgccagaagtgtggcctgagttgaatttctgggaggatgacgcagatgtctgctgcagagctgggctgagagttctgcagtctagctctgacttaggtcaggggcctgttggtctctcattggacgtttttgggtctcactcatgcttactgaaacattgtgccaagaaactctgtgggatttgtgtcccttaaaccagactcacttttctgaaaaatctccattgttgaggagaggctgctcaatcgacaccccgagttctcatgactgggaagatagttttcttcaggtgtcaatggcgttagactcccaggaagactagccctgcccacagggccacctgttggtttgagagcgtgttcgtgttctcttgccctccctgcctaagagctactgggatcacgttagcgggcatttaggctttgatgagagggcacagtttgagttaggtttacctccccctttctgtgcctgggaactgtttggtccagctttagaactgtggttttgacttccttatctcttgggagaagcttctgttttaaggaatttctcttccttcttctcctgcctctagcctctcctggaaaggcctggatatggtttctaaaatctcagctgagaacttcagaaaacagcagcagtattttccttttcctagtgctaaaatccctttccctagaaattggctcaccttgggaaacccagggaaagaatcagcaggttctctgccctccctaggggttggggaaggacccaccccggtcagcacagtgccttttcctctcctgctctgagccagggtggggcattccctctagattcaggtttgggcaggggtcctatagtccctgccatggggctgcttccctgtcccttccctcccctttgctggcctactctggcataattcaagtgtcttcttgccttggggatccttagtggcatcaaatggcaacatggaatattgtcctccatgcccctccagaaggacctaggagagtaggtgagctttccaaagtgagagacgaatctttctttctttttttttttaaagggcaggatgggtatgctttgggctttctccttctgtggccccggaggaaggagagactgaggcaaggcaaagtgatagtacactgaagcagaaccggaaacacccaggaactgttcagaaatctcagaagaaatctgcttctcttcgatggaaagatataattaacgatcaaagagctctaagaaaattgcaaagaagccttaatgttcaagctttagaaagatcagagcaatttttctctttcagtccaaactaagactctctgtatttaaatctctctggggcaagagggctagatttcctcattttgttatgagactagattggtaccagtagatcagctgcctagcgagggcaggtttcttctttgcatctgtgtggcttgcttccagtctggcctgtcctttccagctgccttttgtctagcctgctatggggggccagattatcttgataagagcaggtgatttggggactagctgggttggcaggaaaagagcaggatggatctcttgggacaggttcccccaggagtataaacacaaggagccaggattgtgctggcagccaaggaaacagtagtgcctgtttgagttggcagagagggccttggcacctcttgcatccaggcagtcttgtgagatgggggcacatagcactggggaaagcagaactccattctcacctctattttgagcttcagtgctttatttcagtatgaggaaaaacaacaacaaactgaagtgcgctttccgtcctttcaaaggacaactgtcgggaagggagagccgagttgcgaggtaggaggggagcactggcagggagagacattcttgactcctctcttccctggtgtgttgtgatccagggaatgaaaagaaatttgaccctggattggttctctccttggacttaaggaatcttaccttttccttccacaaagttctcccaggcaaggaccagctgcccattctgagcccagggcagcctcttcaaccattattggtctaacctggcttgtcaggaaaccaagcccacccttccacattgggcctggctgctctattctgtaccaagtactggagaaaaagcatcaagttcttagcccttgtagcttctaccctagtttcccatcctctctctgtggaggccaaaccaactctttgccagcagccacaacatgcattgacagcggcacagtgagatataactgatgggctttgaacctggttggccggggaagctgtaggggtggatagagctggctttccttctgggctgtctccatctgaccctaccccttccatgtcccaccccactcccaccaaaaagtacaaaatcaggatgtttttcactgtccattgctttgtgttttaataaacaatttgcagtgacactctgaaaaaaaaaaaaaaaaaa

SEQ ID NO: 947 - DNA, 1800 bp, Homo sapiens
gtggctgagaagaaggaggcctgagagcgacatgtccccggcggctcaggcggagcggcccgtggcgctgtttttctgagtccggggtggcctggcagccggccgaggacgagggtcggcgggggctgcccccgtggtggtggccgccatgctgggagcctgggcggttgagggaaccgctgtggcgctcctgcgactgctgctgctgctgctgccgccggcgatccggggacccgggctcggcgtggccggcgtggccggcgcggcgggggccgggctgcccgagagcgtcatttgggcggtcaacgcgggtggagaggcgcatgtggacgtgcacgggatccacttccgcaaggaccctttggaaggccgggtgggccgagcctcagactatggcatgaaactgccaatcctgcgttccaaccctgaggaccagatcctgtatcaaactgagcggtacaatgaggagacctttggctacgaagtgcccatcaaagaggagggggactacgtgctggtcttgaaatttgcagaggtctactttgcacagtcccagcaaaaggtatttgatgtacgattgaatggccacgtcgtggtgaaggacttggatatctttgatcgtgttgggcatagcacagctcacgatgaaattatacctatgagcatcagaaaggggaagctgagtgtccagggggaggtgtccaccttcacagggaaactctacattgagtttgtcaaggggtactatgacaatcccaaggtctgtgcactctacatcatggctgggacagtggatgatgtaccaaagcttcagcctcatccgggattggagaagaaagaagaggaagaagaagaagaagaatatgatgaagggtctaatctcaaaaaacagaccaataagaaccgggtgcagtcaggcccccgcacacccaacccctatgcctcggacaacagcagcctcatgtttcccatcctggtggccttcggagtcttcattccaaccctcttctgcctctgccggttggcaggatgggtatgctttgggctttctccttctgtggccccggaggaaggagagactgaggcaaggcaaagtgatagtacactgaagcagaaccggaaacacccaggaactgttcagaaatctcagaagaaatctgcttctcttcgatggaaagatataattaacgatcaaagagctttttctctttcagtccaaactaagactctctgtatttaaatctctctggggcaagagggctagatttcctcattttgttatgagactagattggtaccagtagatcagctgcctagcgagggcaggtttcttctttgcatctgtgtggcttgcttccagtctggcctgtcctttccagctgccttttgtctagcctgctatggggggccagattatcttgataagagcaggtgatttggggactagctgggttggcaggaaaagagcaggatggatctcttgggacaggttcccccaggagtataaacacaaggagccaggattgtgctgtctattttgagcttcagtgctttatttcagtatgaggaaaaacaacaacaaactgaagtgcgctttccgtcctttcaaaggacaactgtcgggaagggagagccgagttgcgaggtaggaggggagcactggcagggagagacattcttgactcctctcttccctggtgtgttgtgatccagggcaggcaaggaccagctgcccattctgagcccagggcagcctcttcaaccattattggtctaacctggcttgtcaggaaaccaagc

SEQ ID NO: 948 - DNA, 2590 bp, Homo sapiens
gccttatatagggcgacttggggcacgcagtagctctctcgagtcactccggcgcagtgttgggactgtctgggtatcggaaagcaagcctacgttgctcactattacgtataatccttttcttttcaagatgcctgaggaagtgcaccatggagaggaggaggtggagacttttgcctttcaggcagaaattgcccaactcatgtccctcatcatcaataccttctattccaacaaggagattttccttcgggagttgatctctaatgcttctgatgccttggacaagattcgctatgagagcctgacagacccttcgaagttggacagtggtaaagagctgaaaattgacatcatccccaaccctcaggaacgtaccctgactttggtagacacaggcattggcatgaccaaagctgatctcataaataatttgggaaccattgccaagtctggtactaaagcattcatggaggctcttcaggctggtgcagacatctccatgattgggcagtttggtgttggcttttattctgcctacttggtggcagagaaagtggttgtgatcacaaagcacaacgatgatgaacagtatgcttgggagtcttctgctggaggttccttcactgtgcgtgctgaccatggtgagcccattggcaggggtaccaaagtgatcctccatcttaaagaagatcagacagagtacctagaagagaggcgggtcaaagaagtagtgaagaagcattctcagttcataggctatcccatcaccctttatttggagaaggaacgagagaaggaaattagtgatgatgaggcagaggaagagaaaggtgagaaagaagaggaagataaagatgatgaagaaaaacccaagatcgaagatgtgggttcagatgaggaggatgacagcggtaaggataagaagaagaaaactaagaagatcaaagagaaatacattgatcaggaagaactaaacaagaccaagcctatttggaccagaaaccctgatgacatcacccaagaggagtatggagaattctacaagagcctcactaatgactgggaagaccacttggcagtcaagcacttttctgtagaaggtcagttggaattcagggcattgctatttattcctcgtcgggctccctttgacctttttgagaacaagaagaaaaagaacaacatcaaactctatgtccgccgtgtgttcatcatggacagctgtgatgagttgataccagagtatctcaattttatccgtggtgtggttgactctgaggatctgcccctgaacatctcccgagaaatgctccagcagagcaaaatcttgaaagtcattcgcaaaaacattgttaagaagtgccttgagctcttctctgagctggcagaagacaaggagaattacaagaaattctatgaggcattctctaaaaatctcaagcttggaatccacgaagactccactaaccgccgccgcctgtctgagctgctgcgctatcatacctcccagtctggagatgagatgacatctctgtcagagtatgtttctcgcatgaaggagacacagaagtccatctattacatcactggtgagagcaaagagcaggtggccaactcagcttttgtggagcgagtgcggaaacggggcttcgaggtggtatatatgaccgagcccattgacgagtactgtgtgcagcagctcaaggaatttgatgggaagagcctggtctcagttaccaaggagggtctggagctgcctgaggatgaggaggagaagaagaagatggaagagagcaaggcaaagtttgagaacctctgcaagctcatgaaagaaatcttagataagaaggttgagaaggtgacaatctccaatagacttgtgtcttcaccttgctgcattgtgaccagcacctacggctggacagccaatatggagcggatcatgaaagcccaggcacttcgggacaactccaccatgggctatatgatggccaaaaagcacctggagatcaaccctgaccaccccattgtggagacgctgcggcagaaggctgaggccgacaagaatgataaggcagttaaggacctggtggtgctgctgtttgaaaccgccctgctatcttctggcttttcccttgaggatccccagacccactccaaccgcatctatcgcatgatcaagctaggtctaggtattgatgaagatgaagtggcagcagaggaacccaatgctgcagttcctgatgagatcccccctctcgagggcgatgaggatgcgtctcgcatggaagaagtcgattaggttaggagttcatagttggaaaacttgtgcccttgtatagtgtccccatgggctcccactgcagcctcgagtgcccctgtcccacctggctccccctgctggtgtctagtgtttttttccctctcctgtccttgtgttgaaggcagtaaactaagggtgtcaagccccattccctctctactcttgacagcaggattggatgttgtgtattgtggtttattttattttcttcattttgttctgaaattaaagtatgcaaaataaagaatatgccgtttttataca

SEQ ID NO: 949 - DNA, 2587 bp, Homo sapiens
ggggaggggggagggatagcattaggagatatacctaatgctaaatgacgagttaatgggtgcagcacaccaacatggcacatgtatacatatgtaacaaacctgcacattgtgcacatgtaccctaaaacttaaagtataataataataataataactaaaaaataaaaataaaataaaaaataaaaaaaaagaaaaatacactccaggtatttcacataaaaagggagatagatgctaacaaaatccttagaagagacgaggaggaaagaactagagagagctccctccagctctcagattctccccagcttttggaggacctggaagttgaaaaagtcacagaacggctctggagtcactccggcacagcgtttgtgctgcctgtgtgttggagagccagcctaccttgctctttaatacgtgtaagccttttcttttcaagatgcctgaggaagtgcaccttggagagaaggaggtggagacttttgcctttcaggcagaaattgcccaactcatgtctcttatcatcaataccttctattccaacaaggagattttcctttgggagttgatctctaatgcttctgatgccttggacaagattcgctatgaaagcctaacagacccttccaagttggacagtggtaaagagctgaaaattgacatcatccccaatactcaggaacataccctgactttggtagacacaggcattggcatgaccaaagctgatctcataaataatttgggaaccattgccaagtttcgtacgaaagcattcatggaggctttttaggctggcgcagacatctccatgattgggcaatttggtattggcttttattctgcctacctggtagcagagaaagtggttgtgatcacaaagcccaatgatgatggcatgcctgagagtcttctgctggaggttccttcactgtgtgtgctgaccatggtgagcctattggtaggggtaccaaagtgatcctccaccttaaagaagatcagacagagtacttagaagagatgcaggtcaaagaagtagtggagaagcactctcagttcctaggctatcccatcaccctttatctggagaaggaacgagagaaagaaattagtgatggtaaggcagaggaagagaaaggtgagaaagaagaggaaaataaagatgacgaagaaaagcccaagatcgaagatgtgggttcagatgaggaggatgacagtggtaaggataagaagaagaaaactaagaagatcaaagagaaatacattgatcaggaagaactaaacaagaccaagcctatttggaccagaaacactgaagacatcacccaagaggagtatggagaattctataagagcctcaccaatgactggaaagaccacttggcagtcaggtacttttctgtagaaggtcagttggaattcagggcattgctattcattcctccttaggctccctttcatctttttgagaacaagaagaaaaagaacaacatcaaactctatgtccatcgtgtgttcatcagggacagctgtgttgagttgataccagagtgtctcaactttatccgtggtgtggttgactctgaggatttcccctgaacatctcctgagaaatgctccagcagagcaaaatcttcaaagtcattcacagaaacattgttaagaagtgccttgagctcttcactgagctggtggaagacaaggagaattacaagaaattctatgaggcattctctaaaaatctcaagcttggaatccacaaggactccactaactgatgccacccgtctgagctgctgtgttatcacacctcccagtctggagatgagatgatatctttgttagagtatgtttctcgcatgaaggagatacagaagtccatctattacatcactggtgagagcaaagagcaggttgccaactcagcttttgtggagcaagtatggaagcgggactccagggtggtatatatgaccgagcccattgatggctacgtgtgcagcaactcaaggagtttgatgggaagagcctggtctcagttaccaaggagggcctggagctacctgaggatggggaggagaagaagagaatggaagagaggaaggcaaagtttgagaacctctgcaagttcatgaaagaaactttagataagaaggttgagatggtgacagtctccaacaggcttgtgtcttcatcctgctgcattgtgaccagcacctacagctggacagccaatatggagcagatcatgaaagcctaggcacttcgggtcacctccaccgtgggctatatgatggccaaaaagcacctggagatcaaccccaaccaccccattgtggagacgctgcggcagaaggctgagacacacaagaatgacaaggcagtcaaggacctggtggtgctgccgttagaaactgccttgctgtcttctggcttttcccttgaggatccccagacccattccaaccacatctactgcatgatcaagctaggtctaggtatcgatgaagattaagtgacagcagaggaacacagtgctgtggttcctgatgagatcacccctcttgagggtgacgaggat

SEQ ID NO: 950 - DNA, 2589 bp, Homo sapiens
cgcccgcagagccgccccaggtgcctgggtgttgtgtgattgacgcggggaaggaggggtcagccgatccctccccaaccctccatcccatccctgaggattgggctggtacccgcgtctctcggacagatgcctgaggaagtgcaccatggagaggaggaggtggagacttttgcctttcaggcagaaattgcccaactcatgtccctcatcatcaataccttctattccaacaaggagattttccttcgggagttgatctctaatgcttctgatgccttggacaagattcgctatgagagcctgacagacccttcgaagttggacagtggtaaagagctgaaaattgacatcatccccaaccctcaggaacgtaccctgactttggtagacacaggcattggcatgaccaaagctgatctcataaataatttgggaaccattgccaagtctggtactaaagcattcatggaggctcttcaggctggtgcagacatctccatgattgggcagtttggtgttggcttttattctgcctacttggtggcagagaaagtggttgtgatcacaaagcacaacgatgatgaacagtatgcttgggagtcttctgctggaggttccttcactgtgcgtgctgaccatggtgagcccattggcaggggtaccaaagtgatcctccatcttaaagaagatcagacagagtacctagaagagaggcgggtcaaagaagtagtgaagaagcattctcagttcataggctatcccatcaccctttatttggagaaggaacgagagaaggaaattagtgatgatgaggcagaggaagagaaaggtgagaaagaagaggaagataaagatgatgaagaaaaacccaagatcgaagatgtgggttcagatgaggaggatgacagcggtaaggataagaagaagaaaactaagaagatcaaagagaaatacattgatcaggaagaactaaacaagaccaagcctatttggaccagaaaccctgatgacatcacccaagaggagtatggagaattctacaagagcctcactaatgactgggaagaccacttggcagtcaagcacttttctgtagaaggtcagttggaattcagggcattgctatttattcctcgtcgggctccctttgacctttttgagaacaagaagaaaaagaacaacatcaaactctatgtccgccgtgtgttcatcatggacagctgtgatgagttgataccagagtatctcaattttatccgtggtgtggttgactctgaggatctgcccctgaacatctcccgagaaatgctccagcagagcaaaatcttgaaagtcattcgcaaaaacattgttaagaagtgccttgagctcttctctgagctggcagaagacaaggagaattacaagaaattctatgaggcattctctaaaaatctcaagcttggaatccacgaagactccactaaccgccgccgcctgtctgagctgctgcgctatcatacctcccagtctggagatgagatgacatctctgtcagagtatgtttctcgcatgaaggagacacagaagtccatctattacatcactggtgagagcaaagagcaggtggccaactcagcttttgtggagcgagtgcggaaacggggcttcgaggtggtatatatgaccgagcccattgacgagtactgtgtgcagcagctcaaggaatttgatgggaagagcctggtctcagttaccaaggagggtctggagctgcctgaggatgaggaggagaagaagaagatggaagagagcaaggcaaagtttgagaacctctgcaagctcatgaaagaaatcttagataagaaggttgagaaggtgacaatctccaatagacttgtgtcttcaccttgctgcattgtgaccagcacctacggctggacagccaatatggagcggatcatgaaagcccaggcacttcgggacaactccaccatgggctatatgatggccaaaaagcacctggagatcaaccctgaccaccccattgtggagacgctgcggcagaaggctgaggccgacaagaatgataaggcagttaaggacctggtggtgctgctgtttgaaaccgccctgctatcttctggcttttcccttgaggatccccagacccactccaaccgcatctatcgcatgatcaagctaggtctaggtattgatgaagatgaagtggcagcagaggaacccaatgctgcagttcctgatgagatcccccctctcgagggcgatgaggatgcgtctcgcatggaagaagtcgattaggttaggagttcatagttggaaaacttgtgcccttgtatagtgtccccatgggctcccactgcagcctcgagtgcccctgtcccacctggctccccctgctggtgtctagtgtttttttccctctcctgtccttgtgttgaaggcagtaaactaagggtgtcaagccccattccctctctactcttgacagcaggattggatgttgtgtattgtggtttattttattttcttcattttgttctgaaattaaagtatgcaaaataaagaatatgccgtttttataca

SEQ ID NO: 951 - DNA, 2556 bp, Homo sapiens
gcgcagtgttgggactgtctgggtatcggaaagcaagcctacgttgctcactattacgtataatccttttcttttcaagatgcctgaggaagtgcaccatggagaggaggaggtggagacttttgcctttcaggcagaaattgcccaactcatgtccctcatcatcaataccttctattccaacaaggagattttccttcgggagttgatctctaatgcttctgatgccttggacaagattcgctatgagagcctgacagacccttcgaagttggacagtggtaaagagctgaaaattgacatcatccccaaccctcaggaacgtaccctgactttggtagacacaggcattggcatgaccaaagctgatctcataaataatttgggaaccattgccaagtctggtactaaagcattcatggaggctcttcaggctggtgcagacatctccatgattgggcagtttggtgttggcttttattctgcctacttggtggcagagaaagtggttgtgatcacaaagcacaacgatgatgaacagtatgcttgggagtcttctgctggaggttccttcactgtgcgtgctgaccatggtgagcccattggcaggggtaccaaagtgatcctccatcttaaagaagatcagacagagtacctagaagagaggcgggtcaaagaagtagtgaagaagcattctcagttcataggctatcccatcaccctttatttggagaaggaacgagagaaggaaattagtgatgatgaggcagaggaagagaaaggtgagaaagaagaggaagataaagatgatgaagaaaagcccaagatcgaagatgtgggttcagatgaggaggatgacagcggtaaggataagaagaagaaaactaagaagatcaaagagaaatacattgatcaggaagaactaaacaagaccaagcctatttggaccagaaaccctgatgacatcacccaagaggagtatggagaattctacaagagcctcactaatgactgggaagaccacttggcagtcaagcacttttctgtagaaggtcagttggaattcagggcattgctatttattcctcgtcgggctccctttgacctttttgagaacaagaagaaaaagaacaacatcaaactctatgtccgccgtgtgttcatcatggacagctgtgatgagttgataccagagtatctcaattttatccgtggtgtggttgactctgaggatctgcccctgaacatctcccgagaaatgctccagcagagcaaaatcttgaaagtcattcgcaaaaacattgttaagaagtgccttgagctcttctctgagctggcagaagacaaggagaattacaagaaattctatgaggcattctctaaaaatctcaagcttggaatccacgaagactccactaaccgccgccgcctgtctgagctgctgcgctatcatacctcccagtctggagatgagatgacatctctgtcagagtatgtttctcgcatgaaggagacacagaagtccatctattacatcactggtgagagcaaagagcaggtggccaactcagcttttgtggagcgagtgcggaaacggggcttcgaggtggtatatatgaccgagcccattgacgagtactgtgtgcagcagctcaaggaatttgatgggaagagcctggtctcagttaccaaggagggtctggagctgcctgaggatgaggaggagaagaagaagatggaagagagcaaggcaaagtttgagaacctctgcaagctcatgaaagaaatcttagataagaaggttgagaaggtgacaatctccaatagacttgtgtcttcaccttgctgcattgtgaccagcacctacggctggacagccaatatggagcggatcatgaaagcccaggcacttcgggacaactccaccatgggctatatgatggccaaaaagcacctggagatcaaccctgaccaccccattgtggagacgctgcggcagaaggctgaggccgacaagaatgataaggcagttaaggacctggtggtgctgctgtttgaaaccgccctgctatcttctggcttttcccttgaggatccccagacccactccaaccgcatctatcgcatgatcaagctaggtctaggtattgatgaagatgaagtggcagcagaggaacccaatgctgcagttcctgatgagatcccccctctcgagggcgatgaggatgcgtctcgcatggaagaagtcgattaggttaggagttcatagttggaaaacttgtgcccttgtatagtgtccccatgggctcccactgcagcctcgagtgcccctgtcccacctggctccccctgctggtgtctagtgtttttttccctctcctgtccttgtgttgaaggcagtaaactaagggtgtcaagccccattccctctctactcttgacagcaggattggatgttgtgtattgtggtttattttattttcttcattttgttctgaaattaaagtatgcaaaataaagaatatgccgtttttatacaaaaaaaaaaaaaaaaaa

SEQ ID NO: 952 - DNA, 657 bp, Homo sapiens
ttttctggtgagagcaaagagcaggtggccaattctgcttttgtggaccgagtgtggaagcggggcttcaaggtagtctctatgactgagtccattgatgagtaatgtgtgcagcagctcaaggaatttgatgggaaaagcctggtctcagttaccaaggagagtctggagctacctgagaatgaggagaagaaaatggaagagagcaaggcaaagtttgagaacctctgcaagctcatgaaaaaaaatcttagataaaaagtttgagaagatgacaatcttcaataggcttgtgtcttcaccctgttgcattgtgaccagcacctatggctggacagccaatatggagcagatcatgaaagcccaggcacttcgggacaactctaccatgggctacatgatggccaaaaagcacctggagatcaaccccaaccaccccattgtggagatgctgcagcagaaggctgaggctgataggaacagcaaggcagtcagggacctgatggtgctgctgtttgaaaccgtgctgctctcttctggcttcttccttgaggatccccaaactcactccaactagattgactgcaggatcaagctaggcctgttgaggatgaagtggaagcagaggaacccagtgctgcagttcctgatgagatt

SEQ ID NO: 953 - DNA, 448 bp, Homo sapiens
tctgccctctctggtcaccctgcctagctagaggatctgtgaccccagccatgaggaccctcgccatccttgctgccattctcctggtggccctgcaggcccaggctgagccactccaggcaagagctgatgaggttgctgcagccccggagcagattgcagcggacatcccagaagtggttgtttcccttgcatgggacgaaagcttggctccaaagcatccaggctcaaggaaaaacatggcctgctattgcagaataccagcgtgcattgcaggagaacgtcgctatggaacctgcatctaccagggaagactctgggcattctgctgctgagcttgcagaaaaagaaaaatgagctcaaaatttgctttgagagctacagggaattgctattactcctgtaccttctgctcaatttcctttcctcatcccaaataaatgccttg

SEQ ID NO: 954 - DNA, 487 bp, Homo sapiens
ccttgctatagaagacctgggacagaggactgctgtctgccctctctggtcaccctgcctagctagaggatctgtgaccccagccatgaggaccctcgccatccttgctgccattctcctggtggccctgcaggcccaggctgagccactccaggcaagagctgatgaggttgctgcagccccggagcagattgcagcggacatcccagaagtggttgtttcccttgcatgggacgaaagcttggctccaaagcatccaggctcaaggaaaaacatggactgctattgcagaataccagcgtgcattgcaggagaacgtcgctatggaacctgcatctaccagggaagactctgggcattctgctgctgagcttgcagaaaaagaaaaatgagctcaaaatttgctttgagagctacagggaattgctattactcctgtaccttctgctcaatttcctttcctcatctcaaataaatgccttgttac

SEQ ID NO: 955 - DNA, 5463 bp, Homo sapiens
gcggccgctgcaggtccccgctcccctccccgtgcgtccgcccatggccgccgccgggcagctgtgcttgctctacctgtcggcggggctcctgtcccggctcggcgcagccttcaacttggacactcgggaggacaacgtgatccggaaatatggagaccccgggagcctcttcggcttctcgctggccatgcactggcaactgcagcccgaggacaagcggctgttgctcgtgggggccccgcgggcagaagcgcttccactgcagagagccaacagaacgggagggctgtacagctgcgacatcaccgcccgggggccatgcacgcggatcgagtttgataacgatgctgaccccacgtcagaaagcaaggaagatcagtggatgggggtcaccgtccagagccaaggtccagggggcaaggtcgtgacatgtgctcaccgatatgaaaaaaggcagcatgttaatacgaagcaggaatcccgagacatctttgggcggtgttatgtcctgagtcagaatctcaggattgaagacgatatggatgggggagattggagcttttgtgatgggcgattgagaggccatgagaaatttggctcttgccagcaaggtgtagcagctacttttactaaagactttcattacattgtatttggagccccgggtacttataactggaaagggattgttcgtgtagagcaaaagaataacactttttttgacatgaacatctttgaagatgggccttatgaagttggtggagagactgagcatgatgaaagtctcgttcctgttcctgctaacagttacttaggcctgctgtttttgaccagcgtttcctatacagatcctgatcagtttgtttataaaacacggcctccccgggagcagcctgacacattccctgatgtgatgatgaatagctacctaggtttttctttggactcagggaaaggtattgtttctaaagatgagatcacttttgtatctggtgctcccagagccaatcacagtggagccgtggttttgctgaagagagacatgaagtctgcacatctcctccctgagcacatattcgatggagaaggtctggcctcttcatttggctatgatgtggcggtggtggacctcaacaaggatgggtggcaagatatagttattggagccccacagtattttgatagagatggagaagttggaggtgcagtgtatgtctacatgaaccagcaaggcagatggaataatgtgaagccaattcgtcttaatggaaccaaagattctatgtttggcattgcagtaaaaaatattggagatattaatcaagatggctacccagatattgcagttggagctccgtatgatgacttgggaaaggtttttatctatcatggatctgcaaatggaataaataccaaaccaacacaggttctcaagggtatatcaccttattttggatattcaattgctggaaacatggaccttgatcgaaattcctaccctgatgttgctgttggttccctctcagattcagtaactattttcagatcccggcctgtgattaatattcagaaaaccatcacagtaactcctaacagaattgacctccgccagaaaacagcgtgtggggcgcctagtgggatatgcctccaggttaaatcctgttttgaatatactgctaaccccgctggttataatccttcaatatcaattgtgggcacacttgaagctgaaaaagaaagaagaaaatctgggctatcctcaagagttcagtttcgaaaccaaggttctgagcccaaatatactcaagaactaactctgaagaggcagaaacagaaagtgtgcatggaggaaaccctgtggctacaggataatatcagagataaactgcgtcccattcccataactgcctcagtggagatccaagagccaagctctcgtaggcgagtgaattcacttccagaagttcttccaattctgaattcagatgaacccaagacagctcatattgatgttcacttcttaaaagagggatgtggagacgacaatgtatgtaacagcaaccttaaactagaatataaattttgcacccgagaaggaaatcaagacaaattttcttatttaccaattcaaaaaggtgtaccagaactagttctaaaagatcagaaggatattgctttagaaataacagtgacaaacagcccttccaacccaaggaatcccacaaaagatggcgatgacgcccatgaggctaaactgattgcaacgtttccagacactttaacctattctgcatatagagaactgagggctttccctgagaaacagttgagttgtgttgccaaccagaatggctcgcaagctgactgtgagctcggaaatccttttaaaagaaattcaaatgtcactttttatttggttttaagtacaactgaagtcacctttgacaccccagatctggatattaatctgaagttagaaacaacaagcaatcaagataatttggctccaattacagctaaagcaaaagtggttattgaactgcttttatcggtctcgggagttgctaaaccttcccaggtgtattttggaggtacagttgttggcgagcaagctatgaaatctgaagatgaagtgggaagtttaatagagtatgaattcagggtaataaacttaggtaaacctcttacaaacctcggcacagcaaccttgaacattcagtggccaaaagaaattagcaatgggaaatggttgctttatttggtgaaagtagaatccaaaggattggaaaaggtaacttgtgagccacaaaaggagataaactccctgaacctaacggagtctcacaactcaagaaagaaacgggaaattactgaaaaacagatagatgataacagaaaattttctttatttgctgaaagaaaataccagactcttaactgtagcgtgaacgtgaactgtgtgaacatcagatgcccgctgcgggggctggacagcaaggcgtctcttattttgcgctcgaggttatggaacagcacatttctagaggaatattccaaactgaactacttggacattctcatgcgagccttcattgatgtgactgctgctgccgaaaatatcaggctgccaaatgcaggcactcaggttcgagtgactgtgtttccctcaaagactgtagctcagtattcgggagtaccttggtggatcatcctagtggctattctcgctgggatcttgatgcttgctttattagtgtttatactatggaagtgtggattctttaaacgctctaggtacgatgacagtgttccccgataccatgctgtaaggatccggaaagaagagcgagagatcaaagatgaaaagtatattgataaccttgaaaaaaaacagtggatcacaaagtggaacgaaaatgaaagctactcatagcgggggcctaaaaaaaaaaagcttcacagtacccaaactgctttttccaactcagaaattcaatttggatttaaaagcctgctcaatccctgaggactgatttcagagtgactacacacagtacgaacctacagttttaactgtggatattgttacgtagcctaaggctcctgttttgcacagccaaatttaaaactgttggaatggatttttctttaactgccgtaatttaactttctgggttgcctttatttttggcgtggctgacttacatcatgtgttggggaagggcctgcccagttgcactcaggtgacatcctccagatagtgtagctgaggaggcacctacactcacctgcactaacagagtggccgtcctaacctcgggcctgctgcgcagacgtccatcacgttagctgtcccacatcacaagactatgccattggggtagttgtgtttcaacggaaagtgctgtcttaaactaaatgtgcaatagaaggtgatgttgccatcctaccgtcttttcctgtttcctagctgtgtgaatacctgctcacgtcaaatgcatacaagtttcattctccctttcactaaaacacacaggtgcaacagacttgaatgctagttatacttatttgtatatggtatttattttttcttttctttacaaaccattttgttattgactaacaggccaaagagtctccagtttacccttcaggttggtttaatcaatcagaattagagcatgggaggtcatcactttgacctaaattatttactgcaaaaagaaaatctttataaatgtaccagagagagttgttttaataacttatctataaactataacctctccttcatgacagcctccaccccacaacccaaaaggtttaagaaatagaattataactgtaaagatgtttatttcaggcattggatattttttactttagaagcctgcataatgtttctggatttcatactgtaacattcaggaattcttggagaaaatgggtttattcactgaactctagtgcggtttactcactgctgcaaatactgtatattcaggacttgaaagaaatggtgaatgcctatggtggatccaaactgatccagtataagactactgaatctgctaccaaaacagttaatcagtgagtcgatgttctattttttgttttgtttcctcccctatctgtattcccaaaaattactttggggctaatttaacaagaactttaaattgtgttttaattgtaaaaatggcagggggtggaattattactctatacattcaacagagactgaatagatatgaaagctgattttttttaattaccatgcttcacaatgttaagttatatggggagcaacagcaaacaggtgctaatttgttttggatatagtataagcagtgtctgtgttttgaaagaatagaacacagtttgtagtgccactgttgttttgggggggcttttttcttttcggaaatcttaaaccttaagatactaaggacgttgttttggttgtactttggaattcttagtcacaaaatatattttgtttacaaaaatttctgtaaaacaggttataacagtgtttaaagtctcagtttcttgcttggggaacttgtgtccctaatgtgtttagattgctagattgctaaggagctgatactttgacagtgtttttagacctgtgttactaaaaaaaagatgaatgtcctgaaaagggtgttgggagggtggttcaacaaagaaacaaagatgttatggtgtttagatttatggttgttaaaaatgtcatctcaagtcaagtcactggtctgtttgcatttgatacatttttgtactaactagcattgtaaaattatttcatgattagaaattacctgtggatatttgtataaaagtgtgaaataaattttttataaaagtgttcattgtttcgtaacacagcattgtatatgtgaagcaaactctaaaattataaatgacaacctgaattatctatttcatcaaacc

SEQ ID NO: 956 - DNA, 5476 bp, Homo sapiens
gcggccgctgcaggtccccgctcccctccccgtgcgtccgcccatggccgccgccgggcagctgtgcttgctctacctgtcggcggggctcctgtcccggctcggcgcagccttcaacttggacactcgggaggacaacgtgatccggaaatatggagaccccgggagcctcttcggcttctcgctggccatgcactggcaactgcagcccgaggacaagcggctgttgctcgtgggggccccgcgggcagaagcgcttccactgcagagagccaacagaacgggagggctgtacagctgcgacatcaccgcccgggggccatgcacgcggatcgagtttgataacgatgctgaccccacgtcagaaagcaaggaagatcagtggatgggggtcaccgtccagagccaaggtccagggggcaaggtcgtgacatgtgctcaccgatatgaaaaaaggcagcatgttaatacgaagcaggaatcccgagacatctttgggcggtgttatgtcctgagtcagaatctcaggattgaagacgatatggatgggggagattggagcttttgtgatgggcgattgagaggccatgagaaatttggctcttgccagcaaggtgtagcagctacttttactaaagactttcattacattgtatttggagccccgggtacttataactggaaagggattgttcgtgtagagcaaaagaataacactttttttgacatgaacatctttgaagatgggccttatgaagttggtggagagactgagcatgatgaaagtctcgttcctgttcctgctaacagttacttaggtttttctttggactcagggaaaggtattgtttctaaagatgagatcacttttgtatctggtgctcccagagccaatcacagtggagccgtggttttgctgaagagagacatgaagtctgcacatctcctccctgagcacatattcgatggagaaggtctggcctcttcatttggctatgatgtggcggtggtggacctcaacaaggatgggtggcaagatatagttattggagccccacagtattttgatagagatggagaagttggaggtgcagtgtatgtctacatgaaccagcaaggcagatggaataatgtgaagccaattcgtcttaatggaaccaaagattctatgtttggcattgcagtaaaaaatattggagatattaatcaagatggctacccagatattgcagttggagctccgtatgatgacttgggaaaggtttttatctatcatggatctgcaaatggaataaataccaaaccaacacaggttctcaagggtatatcaccttattttggatattcaattgctggaaacatggaccttgatcgaaattcctaccctgatgttgctgttggttccctctcagattcagtaactattttcagatcccggcctgtgattaatattcagaaaaccatcacagtaactcctaacagaattgacctccgccagaaaacagcgtgtggggcgcctagtgggatatgcctccaggttaaatcctgttttgaatatactgctaaccccgctggttataatccttcaatatcaattgtgggcacacttgaagctgaaaaagaaagaagaaaatctgggctatcctcaagagttcagtttcgaaaccaaggttctgagcccaaatatactcaagaactaactctgaagaggcagaaacagaaagtgtgcatggaggaaaccctgtggctacaggataatatcagagataaactgcgtcccattcccataactgcctcagtggagatccaagagccaagctctcgtaggcgagtgaattcacttccagaagttcttccaattctgaattcagatgaacccaagacagctcatattgatgttcacttcttaaaagagggatgtggagacgacaatgtatgtaacagcaaccttaaactagaatataaattttgcacccgagaaggaaatcaagacaaattttcttatttaccaattcaaaaaggtgtaccagaactagttctaaaagatcagaaggatattgctttagaaataacagtgacaaacagcccttccaacccaaggaatcccacaaaagatggcgatgacgcccatgaggctaaactgattgcaacgtttccagacactttaacctattctgcatatagagaactgagggctttccctgagaaacagttgagttgtgttgccaaccagaatggctcgcaagctgactgtgagctcggaaatccttttaaaagaaattcaaatgtcactttttatttggttttaagtacaactgaagtcacctttgacaccccagatctggatattaatctgaagttagaaacaacaagcaatcaagataatttggctccaattacagctaaagcaaaagtggttattgaactgcttttatcggtctcgggagttgctaaaccttcccaggtgtattttggaggtacagttgttggcgagcaagctatgaaatctgaagatgaagtgggaagtttaatagagtatgaattcagggtaataaacttaggtaaacctcttacaaacctcggcacagcaaccttgaacattcagtggccaaaagaaattagcaatgggaaatggttgctttatttggtgaaagtagaatccaaaggattggaaaaggtaacttgtgagccacaaaaggagataaactccctgaacctaacggagtctcacaactcaagaaagaaacgggaaattactgaaaaacagatagatgataacagaaaattttctttatttgctgaaagaaaataccagactcttaactgtagcgtgaacgtgaactgtgtgaacatcagatgcccgctgcgggggctggacagcaaggcgtctcttattttgcgctcgaggttatggaacagcacatttctagaggaatattccaaactgaactacttggacattctcatgcgagccttcattgatgtgactgctgctgccgaaaatatcaggctgccaaatgcaggcactcaggttcgagtgactgtgtttccctcaaagactgtagctcagtattcgggagtaccttggtggatcatcctagtggctattctcgctgggatcttgatgcttgctttattagtgtttatactatggaagtgtggtttcttcaagagaaataagaaagatcattatgatgccacatatcacaaggctgagatccatgctcagccatctgataaagagaggcttacttctgatgcatagtattgatctacttctgtaattgtgtggattctttaaacgctctaggtacgatgacagtgttccccgataccatgctgtaaggatccggaaagaagagcgagagatcaaagatgaaaagtatattgataaccttgaaaaaaaacagtggatcacaaagtggaacgaaaatgaaagctactcatagcgggggcctaaaaaaaaaaagcttcacagtacccaaactgctttttccaactcagaaattcaatttggatttaaaagcctgctcaatccctgaggactgatttcagagtgactacacacagtacgaacctacagttttaactgtggatattgttacgtagcctaaggctcctgttttgcacagccaaatttaaaactgttggaatggatttttctttaactgccgtaatttaactttctgggttgcctttatttttggcgtggctgacttacatcatgtgttggggaagggcctgcccagttgcactcaggtgacatcctccagatagtgtagctgaggaggcacctacactcacctgcactaacagagtggccgtcctaacctcgggcctgctgcgcagacgtccatcacgttagctgtcccacatcacaagactatgccattggggtagttgtgtttcaacggaaagtgctgtcttaaactaaatgtgcaatagaaggtgatgttgccatcctaccgtcttttcctgtttcctagctgtgtgaatacctgctcacgtcaaatgcatacaagtttcattctccctttcactaaaacacacaggtgcaacagacttgaatgctagttatacttatttgtatatggtatttattttttcttttctttacaaaccattttgttattgactaacaggccaaagagtctccagtttacccttcaggttggtttaatcaatcagaattagagcatgggaggtcatcactttgacctaaattatttactgcaaaaagaaaatctttataaatgtaccagagagagttgttttaataacttatctataaactataacctctccttcatgacagcctccaccccacaacccaaaaggtttaagaaatagaattataactgtaaagatgtttatttcaggcattggatattttttactttagaagcctgcataatgtttctggatttcatactgtaacattcaggaattcttggagaaaatgggtttattcactgaactctagtgcggtttactcactgctgcaaatactgtatattcaggacttgaaagaaatggtgaatgcctatggtggatccaaactgatccagtataagactactgaatctgctaccaaaacagttaatcagtgagtcgatgttctattttttgttttgtttcctcccctatctgtattcccaaaaattactttggggctaatttaacaagaactttaaattgtgttttaattgtaaaaatggcagggggtggaattattactctatacattcaacagagactgaatagatatgaaagctgattttttttaattaccatgcttcacaatgttaagttatatggggagcaacagcaaacaggtgctaatttgttttggatatagtataagcagtgtctgtgttttgaaagaatagaacacagtttgtagtgccactgttgttttgggggggcttttttcttttcggaaatcttaaaccttaagatactaaggacgttgttttggttgtactttggaattcttagtcacaaaatatattttgtttacaaaaatttctgtaaaacaggttataacagtgtttaaagtctcagtttcttgcttggggaacttgtgtccctaatgtgtttagattgctagattgctaaggagctgatactttgacagtgtttttagacctgtgttactaaaaaaaagatgaatgtcctgaaaagggtgttgggagggtggttcaacaaagaaacaaagatgttatggtgtttagatttatggttgttaaaaatgtcatctcaagtcaagtcactggtctgtttgcatttgatacatttttgtactaactagcattgtaaaattatttcatgattagaaattacctgtggatatttgtataaaagtgtgaaataaattttttataaaagtgttcattgtttcgtaacacagcattgtatatgtgaagcaaactctaaaattataaatgacaacctgaattatctatttcatcaaacc

SEQ ID NO: 957 - DNA, 5346 bp, Homo sapiens
gcggccgctgcaggtccccgctcccctccccgtgcgtccgcccatggccgccgccgggcagctgtgcttgctctacctgtcggcggggctcctgtcccggctcggcgcagccttcaacttggacactcgggaggacaacgtgatccggaaatatggagaccccgggagcctcttcggcttctcgctggccatgcactggcaactgcagcccgaggacaagcggctgttgctcgtgggggccccgcgggcagaagcgcttccactgcagagagccaacagaacgggagggctgtacagctgcgacatcaccgcccgggggccatgcacgcggatcgagtttgataacgatgctgaccccacgtcagaaagcaaggaagatcagtggatgggggtcaccgtccagagccaaggtccagggggcaaggtcgtgacatgtgctcaccgatatgaaaaaaggcagcatgttaatacgaagcaggaatcccgagacatctttgggcggtgttatgtcctgagtcagaatctcaggattgaagacgatatggatgggggagattggagcttttgtgatgggcgattgagaggccatgagaaatttggctcttgccagcaaggtgtagcagctacttttactaaagactttcattacattgtatttggagccccgggtacttataactggaaagggattgttcgtgtagagcaaaagaataacactttttttgacatgaacatctttgaagatgggccttatgaagttggtggagagactgagcatgatgaaagtctcgttcctgttcctgctaacagttacttaggtttttctttggactcagggaaaggtattgtttctaaagatgagatcacttttgtatctggtgctcccagagccaatcacagtggagccgtggttttgctgaagagagacatgaagtctgcacatctcctccctgagcacatattcgatggagaaggtctggcctcttcatttggctatgatgtggcggtggtggacctcaacaaggatgggtggcaagatatagttattggagccccacagtattttgatagagatggagaagttggaggtgcagtgtatgtctacatgaaccagcaaggcagatggaataatgtgaagccaattcgtcttaatggaaccaaagattctatgtttggcattgcagtaaaaaatattggagatattaatcaagatggctacccagatattgcagttggagctccgtatgatgacttgggaaaggtttttatctatcatggatctgcaaatggaataaataccaaaccaacacaggttctcaagggtatatcaccttattttggatattcaattgctggaaacatggaccttgatcgaaattcctaccctgatgttgctgttggttccctctcagattcagtaactattttcagatcccggcctgtgattaatattcagaaaaccatcacagtaactcctaacagaattgacctccgccagaaaacagcgtgtggggcgcctagtgggatatgcctccaggttaaatcctgttttgaatatactgctaaccccgctggttataatccttcaatatcaattgtgggcacacttgaagctgaaaaagaaagaagaaaatctgggctatcctcaagagttcagtttcgaaaccaaggttctgagcccaaatatactcaagaactaactctgaagaggcagaaacagaaagtgtgcatggaggaaaccctgtggctacaggataatatcagagataaactgcgtcccattcccataactgcctcagtggagatccaagagccaagctctcgtaggcgagtgaattcacttccagaagttcttccaattctgaattcagatgaacccaagacagctcatattgatgttcacttcttaaaagagggatgtggagacgacaatgtatgtaacagcaaccttaaactagaatataaattttgcacccgagaaggaaatcaagacaaattttcttatttaccaattcaaaaaggtgtaccagaactagttctaaaagatcagaaggatattgctttagaaataacagtgacaaacagcccttccaacccaaggaatcccacaaaagatggcgatgacgcccatgaggctaaactgattgcaacgtttccagacactttaacctattctgcatatagagaactgagggctttccctgagaaacagttgagttgtgttgccaaccagaatggctcgcaagctgactgtgagctcggaaatccttttaaaagaaattcaaatgtcactttttatttggttttaagtacaactgaagtcacctttgacaccccagatctggatattaatctgaagttagaaacaacaagcaatcaagataatttggctccaattacagctaaagcaaaagtggttattgaactgcttttatcggtctcgggagttgctaaaccttcccaggtgtattttggaggtacagttgttggcgagcaagctatgaaatctgaagatgaagtgggaagtttaatagagtatgaattcagggtaataaacttaggtaaacctcttacaaacctcggcacagcaaccttgaacattcagtggccaaaagaaattagcaatgggaaatggttgctttatttggtgaaagtagaatccaaaggattggaaaaggtaacttgtgagccacaaaaggagataaactccctgaacctaacggagtctcacaactcaagaaagaaacgggaaattactgaaaaacagatagatgataacagaaaattttctttatttgctgaaagaaaataccagactcttaactgtagcgtgaacgtgaactgtgtgaacatcagatgcccgctgcgggggctggacagcaaggcgtctcttattttgcgctcgaggttatggaacagcacatttctagaggaatattccaaactgaactacttggacattctcatgcgagccttcattgatgtgactgctgctgccgaaaatatcaggctgccaaatgcaggcactcaggttcgagtgactgtgtttccctcaaagactgtagctcagtattcgggagtaccttggtggatcatcctagtggctattctcgctgggatcttgatgcttgctttattagtgtttatactatggaagtgtggattctttaaacgctctaggtacgatgacagtgttccccgataccatgctgtaaggatccggaaagaagagcgagagatcaaagatgaaaagtatattgataaccttgaaaaaaaacagtggatcacaaagtggaacgaaaatgaaagctactcatagcgggggcctaaaaaaaaaaagcttcacagtacccaaactgctttttccaactcagaaattcaatttggatttaaaagcctgctcaatccctgaggactgatttcagagtgactacacacagtacgaacctacagttttaactgtggatattgttacgtagcctaaggctcctgttttgcacagccaaatttaaaactgttggaatggatttttctttaactgccgtaatttaactttctgggttgcctttatttttggcgtggctgacttacatcatgtgttggggaagggcctgcccagttgcactcaggtgacatcctccagatagtgtagctgaggaggcacctacactcacctgcactaacagagtggccgtcctaacctcgggcctgctgcgcagacgtccatcacgttagctgtcccacatcacaagactatgccattggggtagttgtgtttcaacggaaagtgctgtcttaaactaaatgtgcaatagaaggtgatgttgccatcctaccgtcttttcctgtttcctagctgtgtgaatacctgctcacgtcaaatgcatacaagtttcattctccctttcactaaaacacacaggtgcaacagacttgaatgctagttatacttatttgtatatggtatttattttttcttttctttacaaaccattttgttattgactaacaggccaaagagtctccagtttacccttcaggttggtttaatcaatcagaattagagcatgggaggtcatcactttgacctaaattatttactgcaaaaagaaaatctttataaatgtaccagagagagttgttttaataacttatctataaactataacctctccttcatgacagcctccaccccacaacccaaaaggtttaagaaatagaattataactgtaaagatgtttatttcaggcattggatattttttactttagaagcctgcataatgtttctggatttcatactgtaacattcaggaattcttggagaaaatgggtttattcactgaactctagtgcggtttactcactgctgcaaatactgtatattcaggacttgaaagaaatggtgaatgcctatggtggatccaaactgatccagtataagactactgaatctgctaccaaaacagttaatcagtgagtcgatgttctattttttgttttgtttcctcccctatctgtattcccaaaaattactttggggctaatttaacaagaactttaaattgtgttttaattgtaaaaatggcagggggtggaattattactctatacattcaacagagactgaatagatatgaaagctgattttttttaattaccatgcttcacaatgttaagttatatggggagcaacagcaaacaggtgctaatttgttttggatatagtataagcagtgtctgtgttttgaaagaatagaacacagtttgtagtgccactgttgttttgggggggcttttttcttttcggaaatcttaaaccttaagatactaaggacgttgttttggttgtactttggaattcttagtcacaaaatatattttgtttacaaaaatttctgtaaaacaggttataacagtgtttaaagtctcagtttcttgcttggggaacttgtgtccctaatgtgtttagattgctagattgctaaggagctgatactttgacagtgtttttagacctgtgttactaaaaaaaagatgaatgtcctgaaaagggtgttgggagggtggttcaacaaagaaacaaagatgttatggtgtttagatttatggttgttaaaaatgtcatctcaagtcaagtcactggtctgtttgcatttgatacatttttgtactaactagcattgtaaaattatttcatgattagaaattacctgtggatatttgtataaaagtgtgaaataaattttttataaaagtgttcattgtttcgtaacacagcattgtatatgtgaagcaaactctaaaattataaatgacaacctgaattatctatttcatcaaacc

SEQ ID NO: 958 - DNA, 5611 bp, Homo sapiens
gcgcgaccgtcccgggggtggggccgggcgcagcggcgagaggaggcgaaggtggctgcggtagcagcagcgcggcagcctcggacccagcccggagcgcagggcggccgctgcaggtccccgctcccctccccgtgcgtccgcccatggccgccgccgggcagctgtgcttgctctacctgtcggcggggctcctgtcccggctcggcgcagccttcaacttggacactcgggaggacaacgtgatccggaaatatggagaccccgggagcctcttcggcttctcgctggccatgcactggcaactgcagcccgaggacaagcggctgttgctcgtgggggccccgcgcggagaagcgcttccactgcagagagccaacagaacgggagggctgtacagctgcgacatcaccgcccgggggccatgcacgcggatcgagtttgataacgatgctgaccccacgtcagaaagcaaggaagatcagtggatgggggtcaccgtccagagccaaggtccagggggcaaggtcgtgacatgtgctcaccgatatgaaaaaaggcagcatgttaatacgaagcaggaatcccgagacatctttgggcggtgttatgtcctgagtcagaatctcaggattgaagacgatatggatgggggagattggagcttttgtgatgggcgattgagaggccatgagaaatttggctcttgccagcaaggtgtagcagctacttttactaaagactttcattacattgtatttggagccccgggtacttataactggaaagggattgttcgtgtagagcaaaagaataacactttttttgacatgaacatctttgaagatgggccttatgaagttggtggagagactgagcatgatgaaagtctcgttcctgttcctgctaacagttacttaggtttttctttggactcagggaaaggtattgtttctaaagatgagatcacttttgtatctggtgctcccagagccaatcacagtggagccgtggttttgctgaagagagacatgaagtctgcacatctcctccctgagcacatattcgatggagaaggtctggcctcttcatttggctatgatgtggcggtggtggacctcaacaaggatgggtggcaagatatagttattggagccccacagtattttgatagagatggagaagttggaggtgcagtgtatgtctacatgaaccagcaaggcagatggaataatgtgaagccaattcgtcttaatggaaccaaagattctatgtttggcattgcagtaaaaaatattggagatattaatcaagatggctacccagatattgcagttggagctccgtatgatgacttgggaaaggtttttatctatcatggatctgcaaatggaataaataccaaaccaacacaggttctcaagggtatatcaccttattttggatattcaattgctggaaacatggaccttgatcgaaattcctaccctgatgttgctgttggttccctctcagattcagtaactattttcagatcccggcctgtgattaatattcagaaaaccatcacagtaactcctaacagaattgacctccgccagaaaacagcgtgtggggcgcctagtgggatatgcctccaggttaaatcctgttttgaatatactgctaaccccgctggttataatccttcaatatcaattgtgggcacacttgaagctgaaaaagaaagaagaaaatctgggctatcctcaagagttcagtttcgaaaccaaggttctgagcccaaatatactcaagaactaactctgaagaggcagaaacagaaagtgtgcatggaggaaaccctgtggctacaggataatatcagagataaactgcgtcccattcccataactgcctcagtggagatccaagagccaagctctcgtaggcgagtgaattcacttccagaagttcttccaattctgaattcagatgaacccaagacagctcatattgatgttcacttcttaaaagagggatgtggagacgacaatgtatgtaacagcaaccttaaactagaatataaattttgcacccgagaaggaaatcaagacaaattttcttatttaccaattcaaaaaggtgtaccagaactagttctaaaagatcagaaggatattgctttagaaataacagtgacaaacagcccttccaacccaaggaatcccacaaaagatggcgatgacgcccatgaggctaaactgattgcaacgtttccagacactttaacctattctgcatatagagaactgagggctttccctgagaaacagttgagttgtgttgccaaccagaatggctcgcaagctgactgtgagctcggaaatccttttaaaagaaattcaaatgtcactttttatttggttttaagtacaactgaagtcacctttgacaccccatatctggatattaatctgaagttagaaacaacaagcaatcaagataatttggctccaattacagctaaagcaaaagtggttattgaactgcttttatcggtctcgggagttgctaaaccttcccaggtgtattttggaggtacagttgttggcgagcaagctatgaaatctgaagatgaagtgggaagtttaatagagtatgaattcagggtaataaacttaggtaaacctcttacaaacctcggcacagcaaccttgaacattcagtggccaaaagaaattagcaatgggaaatggttgctttatttggtgaaagtagaatccaaaggattggaaaaggtaacttgtgagccacaaaaggagataaactccctgaacctaacggagtctcacaactcaagaaagaaacgggaaattactgaaaaacagatagatgataacagaaaattttctttatttgctgaaagaaaataccagactcttaactgtagcgtgaacgtgaactgtgtgaacatcagatgcccgctgcgggggctggacagcaaggcgtctcttattttgcgctcgaggttatggaacagcacatttctagaggaatattccaaactgaactacttggacattctcatgcgagccttcattgatgtgactgctgctgccgaaaatatcaggctgccaaatgcaggcactcaggttcgagtgactgtgtttccctcaaagactgtagctcagtattcgggagtaccttggtggatcatcctagtggctattctcgctgggatcttgatgcttgctttattagtgtttatactatggaagtgtggtttcttcaagagaaataagaaagatcattatgatgccacatatcacaaggctgagatccatgctcagccatctgataaagagaggcttacttctgatgcatagtattgatctacttctgtaattgtgtggattctttaaacgctctaggtacgatgacagtgttccccgataccatgctgtaaggatccggaaagaagagcgagagatcaaagatgaaaagtatattgataaccttgaaaaaaaacagtggatcacaaagtggaacagaaatgaaagctactcatagcgggggcctaaaaaaaaaaaagcttcacagtacccaaactgctttttccaactcagaaattcaatttggatttaaaagcctgctcaatccctgaggactgatttcagagtgactacacacagtacgaacctacagttttaactgtggatattgttacgtagcctaaggctcctgttttgcacagccaaatttaaaactgttggaatggatttttctttaactgccgtaatttaactttctgggttgcctttgtttttggcgtggctgacttacatcatgtgttggggaagggcctgcccagttgcactcaggtgacatcctccagatagtgtagctgaggaggcacctacactcacctgcactaacagagtggccgtcctaacctcgggcctgctgcgcagacgtccatcacgttagctgtcccacatcacaagactatgccattggggtagttgtgtttcaacggaaagtgctgtcttaaactaaatgtgcaatagaaggtgatgttgccatcctaccgtcttttcctgtttcctagctgtgtgaatacctgctcacgtcaaatgcatacaagtttcattctccctttcactaaaaacacacaggtgcaacagacttgaatgctagttatacttatttgtatatggtatttattttttcttttctttacaaaccattttgttattgactaacaggccaaagagtctccagtttacccttcaggttggtttaatcaatcagaattagaattagagcatgggagggtcatcactatgacctaaattatttactgcaaaaagaaaatctttataaatgtaccagagagagttgttttaataacttatctataaactataacctctccttcatgacagcctccaccccacaacccaaaaggtttaagaaatagaattataactgtaaagatgtttatttcaggcattggatattttttactttagaagcctgcataatgtttctggatttacatactgtaacattcaggaattcttggagaagatgggtttattcactgaactctagtgcggtttactcactgctgcaaatactgtatattcaggacttgaaagaaatggtgaatgcctatggaactagtggatccaaactgatccagtataagactactgaatctgctaccaaaacagttaatcagtgagtcgagtgttctattttttgttttgtttcctcccctatctgtattcccaaaaattactttggggctaatttaacaagaactttaaattgtgttttaattgtaaaaatggcagggggtggaattattactctatacattcaacagagactgaatagatatgaaagctgattttttttaattaccatgcttcacaatgttaagttatatggggagcaacagcaaacaggtgctaatttgttttggatatagtataagcagtgtctgtgttttgaaagaatagaacacagtttgtagtgccactgttgttttggggggggctttttttctttttccggaaaatccttaaaccttaagatactaaggacgttgttttggttgtacttggaattcttagtcacaaaatatattttgtttacaaaaatttctgtaaaacaggttataacagtgtttaaagtctcagtttcttgcttggggaacttgtgtccctaatgtgttagattgctagattgctaaggagctgatacttgacagttttttagacctgtgttactaaaaaaaagatgaatgtcggaaaagggtgttgggagggtggtcaacaaagaaacaaagatgttatggtgtttagacttatggttgttaaaaatgtcatctcaagtcaagtcactggtctgtttgcatttgatacatttttgtactaactagcattgtaaaattatttcatgattagaaattacctgtggatatttgtataaaagtgtgaaataaattttttataaaagtgttcattgtttcgtaacacagcattgtatatgtgaagcaaactctaaaattataaatgacaacctgaattatctatttcatcaaaaaaaaaaaaaaaaaaaa

SEQ ID NO: 959 - DNA, 5778 bp, Homo sapiens
gccctcggacagtccctgctcgcccgcgcgctgcagccccatctcctagcggcagcccaggcgcggagggagcgagtccgccccgaggaggaagaggatggcagggccacgccccagcccatgggccaggctgctcctggcagccttgatcagcgtcagcctctctgggaccttggcaaaccgctgcaagaaggccccagtgaagagctgcacggagtgtgtccgtgtggataaggactgcgcctactgcacagacgagatgttcagggaccggcgctgcaacacccaggcggagctgctggccgcgggctgccagcgggagagcatcgtggtcatggagagcagcttccaaatcacagaggagacccagattgacaccaccctgcggcgcagccagatgtccccccaaggcctgcgggtccgtctgcggcccggtgaggagcggcattttgagctggaggtgtttgagccactggagagccccgtggacctgtacatcctcatggacttctccaactccatgtccgatgatctggacaacctcaagaagatggggcagaacctggctcgggtcctgagccagctcaccagcgactacactattggatttggcaagtttgtggacaaagtcagcgtcccgcagacggacatgaggcctgagaagctgaaggagccctggcccaacagtgacccccccttctccttcaagaacgtcatcagcctgacagaagatgtggatgagttccggaataaactgcagggagagcggatctcaggcaacctggatgctcctgagggcggcttcgatgccatcctgcagacagctgtgtgcacgagggacattggctggcgcccggacagcacccacctgctggtcttctccaccgagtcagccttccactatgaggctgatggcgccaacgtgctggctggcatcatgagccgcaacgatgaacggtgccacctggacaccacgggcacctacacccagtacaggacacaggactacccgtcggtgcccaccctggtgcgcctgctcgccaagcacaacatcatccccatctttgctgtcaccaactactcctatagctactacgagaagcttcacacctatttccctgtctcctcactgggggtgctgcaggaggactcgtccaacatcgtggagctgctggaggaggccttcaatcggatccgctccaacctggacatccgggccctagacagcccccgaggccttcggacagaggtcacctccaagatgttccagaagacgaggactgggtcctttcacatccggcggggggaagtgggtatataccaggtgcagctgcgggcccttgagcacgtggatgggacgcacgtgtgccagctgccggaggaccagaagggcaacatccatctgaaaccttccttctccgacggcctcaagatggacgcgggcatcatctgtgatgtgtgcacctgcgagctgcaaaaagaggtgcggtcagctcgctgcagcttcaacggagacttcgtgtgcggacagtgtgtgtgcagcgagggctggagtggccagacctgcaactgctccaccggctctctgagtgacattcagccctgcctgcgggagggcgaggacaagccgtgctccggccgtggggagtgccagtgcgggcactgtgtgtgctacggcgaaggccgctacgagggtcagttctgcgagtatgacaacttccagtgtccccgcacttccgggttcctctgcaatgaccgaggacgctgctccatgggccagtgtgtgtgtgagcctggttggacaggcccaagctgtgactgtcccctcagcaatgccacctgcatcgacagcaatgggggcatctgtaatggacgtggccactgtgagtgtggccgctgccactgccaccagcagtcgctctacacggacaccatctgcgagatcaactactcggcgatccacccgggcctctgcgaggacctacgctcctgcgtgcagtgccaggcgtggggcaccggcgagaagaaggggcgcacgtgtgaggaatgcaacttcaaggtcaagatggtggacgagcttaagagagccgaggaggtggtggtgcgctgctccttccgggacgaggatgacgactgcacctacagctacaccatggaaggtgacggcgcccctgggcccaacagcactgtcctggtgcacaagaagaaggactgccctccgggctccttctggtggctcatccccctgctcctcctcctcctgccgctcctggccctgctactgctgctatgctggaagtactgtgcctgctgcaaggcctgcctggcacttctcccgtgctgcaaccgaggtcacatggtgggctttaaggaagaccactacatgctgcgggagaacctgatggcctctgaccacttggacacgcccatgctgcgcagcgggaacctcaagggccgtgacgtggtccgctggaaggtcaccaacaacatgcagcggcctggctttgccactcatgccgccagcatcaaccccacagagctggtgccctacgggctgtccttgcgcctggcccgcctttgcaccgagaacctgctgaagcctgacactcgggagtgcgcccagctgcgccaggaggtggaggagaacctgaacgaggtctacaggcagatctccggtgtacacaagctccagcagaccaagttccggcagcagcccaatgccgggaaaaagcaagaccacaccattgtggacacagtgctgatggcgccccgctcggccaagccggccctgctgaagcttacagagaagcaggtggaacagagggccttccacgacctcaaggtggcccccggctactacaccctcactgcagaccaggacgcccggggcatggtggagttccaggagggcgtggagctggtggacgtacgggtgcccctctttatccggcctgaggatgacgacgagaagcagctgctggtggaggccatcgacgtgcccgcaggcactgccaccctcggccgccgcctggtaaacatcaccatcatcaaggagcaagccagagacgtggtgtcctttgagcagcctgagttctcggtcagccgcggggaccaggtggcccgcatccctgtcatccggcgtgtcctggacggcgggaagtcccaggtctcctaccgcacacaggatggcaccgcgcagggcaaccgggactacatccccgtggagggtgagctgctgttccagcctggggaggcctggaaagagctgcaggtgaagctcctggagctgcaagaagttgactccctcctgcggggccgccaggtccgccgtttccacgtccagctcagcaaccctaagtttggggcccacctgggccagccccactccaccaccatcatcatcagggacccagatgaactggaccggagcttcacgagtcagatgttgtcatcacagccaccccctcacggcgacctgggcgccccgcagaaccccaatgctaaggccgctgggtccaggaagatccatttcaactggctgcccccttctggcaagccaatggggtacagggtaaagtactggattcagggtgactccgaatccgaagcccacctgctcgacagcaaggtgccctcagtggagctcaccaacctgtacccgtattgcgactatgagatgaaggtgtgcgcctacggggctcagggcgagggaccctacagctccctggtgtcctgccgcacccaccaggaagtgcccagcgagccagggcgtctggccttcaatgtcgtctcctccacggtgacccagctgagctgggctgagccggctgagaccaacggtgagatcacagcctacgaggtctgctatggcctggtcaacgatgacaaccgacctattgggcccatgaagaaagtgctggttgacaaccctaagaaccggatgctgcttattgagaaccttcgggagtcccagccctaccgctacacggtgaaggcgcgcaacggggccggctgggggcctgagcgggaggccatcatcaacctggccacccagcccaagaggcccatgtccatccccatcatccctgacatccctatcgtggacgcccagagcggggaggactacgacagcttccttatgtacagcgatgacgttctacgctctccatcgggcagccagaggcccagcgtctccgatgacactgagcacctggtgaatggccggatggactttgccttcccgggcagcaccaactccctgcacaggatgaccacgaccagtgctgctgcctatggcacccacctgagcccacacgtgccccaccgcgtgctaagcacatcctccaccctcacacgggactacaactcactgacccgctcagaacactcacactcgaccacactgccgagggactactccaccctcacctccgtctcctcccacggcctccctcccatctgggaacacgggaggagcaggcttccgctgtcctgggccctggggtcccggagtcgggctcagatgaaagggttccccccttccaggggcccacgagactctataatcctggctgggaggccagcagcgccctcctggggcccagactctcgcctgactgctggtgtgcccgacacgcccacccgcctggtgttctctgccctggggcccacatctctcagagtgagctggcaggagccgcggtgcgagcggccgctgcagggctacagtgtggagtaccagctgctgaacggcggtgagctgcatcggctcaacatccccaaccctgcccagacctcggtggtggtggaagacctcctgcccaaccactcctacgtgttccgcgtgcgggcccagagccaggaaggctggggccgagagcgtgagggtgtcatcaccattgaatcccaggtgcacccgcagagcccactgtgtcccctgccaggctccgccttcactttgagcactcccagtgccccaggcccgctggtgttcactgccctgagcccagactcgctgcagctgagctgggagcggccacggaggcccaatggggatatcgtcggctacctggtgacctgtgagatggcccaaggaggagggccagccaccgcattccgggtggatggagacagccccgagagccggctgaccgtgccgggcctcagcgagaacgtgccctacaagttcaaggtgcaggccaggaccactgagggcttcgggccagagcgcgagggcatcatcaccatagagtcccaggatggaggacccttcccgcagctgggcagccgtgccgggctcttccagcacccgctgcaaagcgagtacagcagcatcaccaccacccacaccagcgccaccgagcccttcctagtggatgggctgaccctgggggcccagcacctggaggcaggcggctccctcacccggcatgtgacccaggagtttgtgagccggacactgaccaccagcggaacccttagcacccacatggaccaacagttcttccaaacttgaccgcaccctgccccacccccgccacgtcccactaggcgtcctcccgactcctctcccggagcctcctcagctactccatccttgcacccctgggggcccagcccacccgcatgcacagagcaggggctaggtgtctcctgggaggcatgaagggggcaaggtccgtcctctgtgggcccaaacctatttgtaaccaaagagctgggagcagcacaaggacccagcctttgttctgcacttaataaatggttttgctactgcta

SEQ ID NO: 960 - DNA, 5469 bp, Homo sapiens
gccctcggacagtccctgctcgcccgcgcgctgcagccccatctcctagcggcagcccaggcgcggagggagcgagtccgccccgaggaggaagaggatggcagggccacgccccagcccatgggccaggctgctcctggcagccttgatcagcgtcagcctctctgggaccttggcaaaccgctgcaagaaggccccagtgaagagctgcacggagtgtgtccgtgtggataaggactgcgcctactgcacagacgagatgttcagggaccggcgctgcaacacccaggcggagctgctggccgcgggctgccagcgggagagcatcgtggtcatggagagcagcttccaaatcacagaggagacccagattgacaccaccctgcggcgcagccagatgtccccccaaggcctgcgggtccgtctgcggcccggtgaggagcggcattttgagctggaggtgtttgagccactggagagccccgtggacctgtacatcctcatggacttctccaactccatgtccgatgatctggacaacctcaagaagatggggcagaacctggctcgggtcctgagccagctcaccagcgactacactattggatttggcaagtttgtggacaaagtcagcgtcccgcagacggacatgaggcctgagaagctgaaggagccctggcccaacagtgacccccccttctccttcaagaacgtcatcagcctgacagaagatgtggatgagttccggaataaactgcagggagagcggatctcaggcaacctggatgctcctgagggcggcttcgatgccatcctgcagacagctgtgtgcacgagggacattggctggcgcccggacagcacccacctgctggtcttctccaccgagtcagccttccactatgaggctgatggcgccaacgtgctggctggcatcatgagccgcaacgatgaacggtgccacctggacaccacgggcacctacacccagtacaggacacaggactacccgtcggtgcccaccctggtgcgcctgctcgccaagcacaacatcatccccatctttgctgtcaccaactactcctatagctactacgagaagcttcacacctatttccctgtctcctcactgggggtgctgcaggaggactcgtccaacatcgtggagctgctggaggaggccttcaatcggatccgctccaacctggacatccgggccctagacagcccccgaggccttcggacagaggtcacctccaagatgttccagaagacgaggactgggtcctttcacatccggcggggggaagtgggtatataccaggtgcagctgcgggcccttgagcacgtggatgggacgcacgtgtgccagctgccggaggaccagaagggcaacatccatctgaaaccttccttctccgacggcctcaagatggacgcgggcatcatctgtgatgtgtgcacctgcgagctgcaaaaagaggtgcggtcagctcgctgcagcttcaacggagacttcgtgtgcggacagtgtgtgtgcagcgagggctggagtggccagacctgcaactgctccaccggctctctgagtgacattcagccctgcctgcgggagggcgaggacaagccgtgctccggccgtggggagtgccagtgcgggcactgtgtgtgctacggcgaaggccgctacgagggtcagttctgcgagtatgacaacttccagtgtccccgcacttccgggttcctctgcaatgaccgaggacgctgctccatgggccagtgtgtgtgtgagcctggttggacaggcccaagctgtgactgtcccctcagcaatgccacctgcatcgacagcaatgggggcatctgtaatggacgtggccactgtgagtgtggccgctgccactgccaccagcagtcgctctacacggacaccatctgcgagatcaactactcggcgatccacccgggcctctgcgaggacctacgctcctgcgtgcagtgccaggcgtggggcaccggcgagaagaaggggcgcacgtgtgaggaatgcaacttcaaggtcaagatggtggacgagcttaagagagccgaggaggtggtggtgcgctgctccttccgggacgaggatgacgactgcacctacagctacaccatggaaggtgacggcgcccctgggcccaacagcactgtcctggtgcacaagaagaaggactgccctccgggctccttctggtggctcatccccctgctcctcctcctcctgccgctcctggccctgctactgctgctatgctggaagtactgtgcctgctgcaaggcctgcctggcacttctcccgtgctgcaaccgaggtcacatggtgggctttaaggaagaccactacatgctgcgggagaacctgatggcctctgaccacttggacacgcccatgctgcgcagcgggaacctcaagggccgtgacgtggtccgctggaaggtcaccaacaacatgcagcggcctggctttgccactcatgccgccagcatcaaccccacagagctggtgccctacgggctgtccttgcgcctggcccgcctttgcaccgagaacctgctgaagcctgacactcgggagtgcgcccagctgcgccaggaggtggaggagaacctgaacgaggtctacaggcagatctccggtgtacacaagctccagcagaccaagttccggcagcagcccaatgccgggaaaaagcaagaccacaccattgtggacacagtgctgatggcgccccgctcggccaagccggccctgctgaagcttacagagaagcaggtggaacagagggccttccacgacctcaaggtggcccccggctactacaccctcactgcagaccaggacgcccggggcatggtggagttccaggagggcgtggagctggtggacgtacgggtgcccctctttatccggcctgaggatgacgacgagaagcagctgctggtggaggccatcgacgtgcccgcaggcactgccaccctcggccgccgcctggtaaacatcaccatcatcaaggagcaagccagagacgtggtgtcctttgagcagcctgagttctcggtcagccgcggggaccaggtggcccgcatccctgtcatccggcgtgtcctggacggcgggaagtcccaggtctcctaccgcacacaggatggcaccgcgcagggcaaccgggactacatccccgtggagggtgagctgctgttccagcctggggaggcctggaaagagctgcaggtgaagctcctggagctgcaagaagttgactccctcctgcggggccgccaggtccgccgtttccacgtccagctcagcaaccctaagtttggggcccacctgggccagccccactccaccaccatcatcatcagggacccagatgaactggaccggagcttcacgagtcagatgttgtcatcacagccaccccctcacggcgacctgggcgccccgcagaaccccaatgctaaggccgctgggtccaggaagatccatttcaactggctgcccccttctggcaagccaatggggtacagggtaaagtactggattcagggtgactccgaatccgaagcccacctgctcgacagcaaggtgccctcagtggagctcaccaacctgtacccgtattgcgactatgagatgaaggtgtgcgcctacggggctcagggcgagggaccctacagctccctggtgtcctgccgcacccaccaggaagtgcccagcgagccagggcgtctggccttcaatgtcgtctcctccacggtgacccagctgagctgggctgagccggctgagaccaacggtgagatcacagcctacgaggtctgctatggcctggtcaacgatgacaaccgacctattgggcccatgaagaaagtgctggttgacaaccctaagaaccggatgctgcttattgagaaccttcgggagtcccagccctaccgctacacggtgaaggcgcgcaacggggccggctgggggcctgagcgggaggccatcatcaacctggccacccagcccaagaggcccatgtccatccccatcatccctgacatccctatcgtggacgcccagagcggggaggactacgacagcttccttatgtacagcgatgacgttctacgctctccatcgggcagccagaggcccagcgtctccgatgacactgagcacctggtgaatggccggatggactttgccttcccgggcagcaccaactccctgcacaggatgaccacgaccagtgctgctgcctatggcacccacctgagcccacacgtgccccaccgcgtgctaagcacatcctccaccctcacacgggactacaactcactgacccgctcagaacactcacactcgaccacactgccgagggactactccaccctcacctccgtctcctcccacggtgagctgcatcggctcaacatccccaaccctgcccagacctcggtggtggtggaagacctcctgcccaaccactcctacgtgttccgcgtgcgggcccagagccaggaaggctggggccgagagcgtgagggtgtcatcaccattgaatcccaggtgcacccgcagagcccactgtgtcccctgccaggctccgccttcactttgagcactcccagtgccccaggcccgctggtgttcactgccctgagcccagactcgctgcagctgagctgggagcggccacggaggcccaatggggatatcgtcggctacctggtgacctgtgagatggcccaaggaggagggccagccaccgcattccgggtggatggagacagccccgagagccggctgaccgtgccgggcctcagcgagaacgtgccctacaagttcaaggtgcaggccaggaccactgagggcttcgggccagagcgcgagggcatcatcaccatagagtcccaggatggaggacccttcccgcagctgggcagccgtgccgggctcttccagcacccgctgcaaagcgagtacagcagcatcaccaccacccacaccagcgccaccgagcccttcctagtggatgggctgaccctgggggcccagcacctggaggcaggcggctccctcacccggcatgtgacccaggagtttgtgagccggacactgaccaccagcggaacccttagcacccacatggaccaacagttcttccaaacttgaccgcaccctgccccacccccgccacgtcccactaggcgtcctcccgactcctctcccggagcctcctcagctactccatccttgcacccctgggggcccagcccacccgcatgcacagagcaggggctaggtgtctcctgggaggcatgaagggggcaaggtccgtcctctgtgggcccaaacctatttgtaaccaaagagctgggagcagcacaaggacccagcctttgttctgcacttaataaatggttttgctactgcta

SEQ ID NO: 961 - DNA, 5988 bp, Homo sapiens
gccctcggacagtccctgctcgcccgcgcgctgcagccccatctcctagcggcagcccaggcgcggagggagcgagtccgccccgaggaggaagaggatggcagggccacgccccagcccatgggccaggctgctcctggcagccttgatcagcgtcagcctctctgggaccttggcaaaccgctgcaagaaggccccagtgaagagctgcacggagtgtgtccgtgtggataaggactgcgcctactgcacagacgagatgttcagggaccggcgctgcaacacccaggcggagctgctggccgcgggctgccagcgggagagcatcgtggtcatggagagcagcttccaaatcacagaggagacccagattgacaccaccctgcggcgcagccagatgtccccccaaggcctgcgggtccgtctgcggcccggtgaggagcggcattttgagctggaggtgtttgagccactggagagccccgtggacctgtacatcctcatggacttctccaactccatgtccgatgatctggacaacctcaagaagatggggcagaacctggctcgggtcctgagccagctcaccagcgactacactattggatttggcaagtttgtggacaaagtcagcgtcccgcagacggacatgaggcctgagaagctgaaggagccctggcccaacagtgacccccccttctccttcaagaacgtcatcagcctgacagaagatgtggatgagttccggaataaactgcagggagagcggatctcaggcaacctggatgctcctgagggcggcttcgatgccatcctgcagacagctgtgtgcacgagggacattggctggcgcccggacagcacccacctgctggtcttctccaccgagtcagccttccactatgaggctgatggcgccaacgtgctggctggcatcatgagccgcaacgatgaacggtgccacctggacaccacgggcacctacacccagtacaggacacaggactacccgtcggtgcccaccctggtgcgcctgctcgccaagcacaacatcatccccatctttgctgtcaccaactactcctatagctactacgagaagcttcacacctatttccctgtctcctcactgggggtgctgcaggaggactcgtccaacatcgtggagctgctggaggaggccttcaatcggatccgctccaacctggacatccgggccctagacagcccccgaggccttcggacagaggtcacctccaagatgttccagaagacgaggactgggtcctttcacatccggcggggggaagtgggtatataccaggtgcagctgcgggcccttgagcacgtggatgggacgcacgtgtgccagctgccggaggaccagaagggcaacatccatctgaaaccttccttctccgacggcctcaagatggacgcgggcatcatctgtgatgtgtgcacctgcgagctgcaaaaagaggtgcggtcagctcgctgcagcttcaacggagacttcgtgtgcggacagtgtgtgtgcagcgagggctggagtggccagacctgcaactgctccaccggctctctgagtgacattcagccctgcctgcgggagggcgaggacaagccgtgctccggccgtggggagtgccagtgcgggcactgtgtgtgctacggcgaaggccgctacgagggtcagttctgcgagtatgacaacttccagtgtccccgcacttccgggttcctctgcaatgaccgaggacgctgctccatgggccagtgtgtgtgtgagcctggttggacaggcccaagctgtgactgtcccctcagcaatgccacctgcatcgacagcaatgggggcatctgtaatggacgtggccactgtgagtgtggccgctgccactgccaccagcagtcgctctacacggacaccatctgcgagatcaactactcggcgatccacccgggcctctgcgaggacctacgctcctgcgtgcagtgccaggcgtggggcaccggcgagaagaaggggcgcacgtgtgaggaatgcaacttcaaggtcaagatggtggacgagcttaagagagccgaggaggtggtggtgcgctgctccttccgggacgaggatgacgactgcacctacagctacaccatggaaggtgacggcgcccctgggcccaacagcactgtcctggtgcacaagaagaaggactgccctccgggctccttctggtggctcatccccctgctcctcctcctcctgccgctcctggccctgctactgctgctatgctggaagtactgtgcctgctgcaaggcctgcctggcacttctcccgtgctgcaaccgaggtcacatggtgggctttaaggaagaccactacatgctgcgggagaacctgatggcctctgaccacttggacacgcccatgctgcgcagcgggaacctcaagggccgtgacgtggtccgctggaaggtcaccaacaacatgcagcggcctggctttgccactcatgccgccagcatcaaccccacagagctggtgccctacgggctgtccttgcgcctggcccgcctttgcaccgagaacctgctgaagcctgacactcgggagtgcgcccagctgcgccaggaggtggaggagaacctgaacgaggtctacaggcagatctccggtgtacacaagctccagcagaccaagttccggcagcagcccaatgccgggaaaaagcaagaccacaccattgtggacacagtgctgatggcgccccgctcggccaagccggccctgctgaagcttacagagaagcaggtggaacagagggccttccacgacctcaaggtggcccccggctactacaccctcactgcagaccaggacgcccggggcatggtggagttccaggagggcgtggagctggtggacgtacgggtgcccctctttatccggcctgaggatgacgacgagaagcagctgctggtggaggccatcgacgtgcccgcaggcactgccaccctcggccgccgcctggtaaacatcaccatcatcaaggagcaagccagagacgtggtgtcctttgagcagcctgagttctcggtcagccgcggggaccaggtggcccgcatccctgtcatccggcgtgtcctggacggcgggaagtcccaggtctcctaccgcacacaggatggcaccgcgcagggcaaccgggactacatccccgtggagggtgagctgctgttccagcctggggaggcctggaaagagctgcaggtgaagctcctggagctgcaagaagttgactccctcctgcggggccgccaggtccgccgtttccacgtccagctcagcaaccctaagtttggggcccacctgggccagccccactccaccaccatcatcatcagggacccagatgaactggaccggagcttcacgagtcagatgttgtcatcacagccaccccctcacggcgacctgggcgccccgcagaaccccaatgctaaggccgctgggtccaggaagatccatttcaactggctgcccccttctggcaagccaatggggtacagggtaaagtactggattcagggtgactccgaatccgaagcccacctgctcgacagcaaggtgccctcagtggagctcaccaacctgtacccgtattgcgactatgagatgaaggtgtgcgcctacggggctcagggcgagggaccctacagctccctggtgtcctgccgcacccaccaggaagtgcccagcgagccagggcgtctggccttcaatgtcgtctcctccacggtgacccagctgagctgggctgagccggctgagaccaacggtgagatcacagcctacgaggtctgctatggcctggtcaacgatgacaaccgacctattgggcccatgaagaaagtgctggttgacaaccctaagaaccggatgctgcttattgagaaccttcgggagtcccagccctaccgctacacggtgaaggcgcgcaacggggccggctgggggcctgagcgggaggccatcatcaacctggccacccagcccaagaggcccatgtccatccccatcatccctgacatccctatcgtggacgcccagagcggggaggactacgacagcttccttatgtacagcgatgacgttctacgctctccatcgggcagccagaggcccagcgtctccgatgacactggctgcggctggaagttcgagcccctgctgggggaggagctggacctgcggcgcgtcacgtggcggctgcccccggagctcatcccgcgcctgtcggccagcagcgggcgctcctccgacgccgaggcgccccacgggcccccggacgacggcggcgcgggcgggaagggcggcagcctgccccgcagtgcgacacccgggccccccggagagcacctggtgaatggccggatggactttgccttcccgggcagcaccaactccctgcacaggatgaccacgaccagtgctgctgcctatggcacccacctgagcccacacgtgccccaccgcgtgctaagcacatcctccaccctcacacgggactacaactcactgacccgctcagaacactcacactcgaccacactgccgagggactactccaccctcacctccgtctcctcccacggcctccctcccatctgggaacacgggaggagcaggcttccgctgtcctgggccctggggtcccggagtcgggctcagatgaaagggttccccccttccaggggcccacgagactctataatcctggctgggaggccagcagcgccctcctggggcccagactctcgcctgactgctggtgtgcccgacacgcccacccgcctggtgttctctgccctggggcccacatctctcagagtgagctggcaggagccgcggtgcgagcggccgctgcagggctacagtgtggagtaccagctgctgaacggcggtgagctgcatcggctcaacatccccaaccctgcccagacctcggtggtggtggaagacctcctgcccaaccactcctacgtgttccgcgtgcgggcccagagccaggaaggctggggccgagagcgtgagggtgtcatcaccattgaatcccaggtgcacccgcagagcccactgtgtcccctgccaggctccgccttcactttgagcactcccagtgccccaggcccgctggtgttcactgccctgagcccagactcgctgcagctgagctgggagcggccacggaggcccaatggggatatcgtcggctacctggtgacctgtgagatggcccaaggaggagggccagccaccgcattccgggtggatggagacagccccgagagccggctgaccgtgccgggcctcagcgagaacgtgccctacaagttcaaggtgcaggccaggaccactgagggcttcgggccagagcgcgagggcatcatcaccatagagtcccaggatggaggacccttcccgcagctgggcagccgtgccgggctcttccagcacccgctgcaaagcgagtacagcagcatcaccaccacccacaccagcgccaccgagcccttcctagtggatgggctgaccctgggggcccagcacctggaggcaggcggctccctcacccggcatgtgacccaggagtttgtgagccggacactgaccaccagcggaacccttagcacccacatggaccaacagttcttccaaacttgaccgcaccctgccccacccccgccacgtcccactaggcgtcctcccgactcctctcccggagcctcctcagctactccatccttgcacccctgggggcccagcccacccgcatgcacagagcaggggctaggtgtctcctgggaggcatgaagggggcaaggtccgtcctctgtgggcccaaacctatttgtaaccaaagagctgggagcagcacaaggacccagcctttgttctgcacttaataaatggttttgctactgcta

SEQ ID NO: 962 - DNA, 5829 bp, Homo sapiens
gccctcggacagtccctgctcgcccgcgcgctgcagccccatctcctagcggcagcccaggcgcggagggagcgagtccgccccgaggaggaagaggatggcagggccacgccccagcccatgggccaggctgctcctggcagccttgatcagcgtcagcctctctgggaccttggcaaaccgctgcaagaaggccccagtgaagagctgcacggagtgtgtccgtgtggataaggactgcgcctactgcacagacgagatgttcagggaccggcgctgcaacacccaggcggagctgctggccgcgggctgccagcgggagagcatcgtggtcatggagagcagcttccaaatcacagaggagacccagattgacaccaccctgcggcgcagccagatgtccccccaaggcctgcgggtccgtctgcggcccggtgaggagcggcattttgagctggaggtgtttgagccactggagagccccgtggacctgtacatcctcatggacttctccaactccatgtccgatgatctggacaacctcaagaagatggggcagaacctggctcgggtcctgagccagctcaccagcgactacactattggatttggcaagtttgtggacaaagtcagcgtcccgcagacggacatgaggcctgagaagctgaaggagccctggcccaacagtgacccccccttctccttcaagaacgtcatcagcctgacagaagatgtggatgagttccggaataaactgcagggagagcggatctcaggcaacctggatgctcctgagggcggcttcgatgccatcctgcagacagctgtgtgcacgagggacattggctggcgcccggacagcacccacctgctggtcttctccaccgagtcagccttccactatgaggctgatggcgccaacgtgctggctggcatcatgagccgcaacgatgaacggtgccacctggacaccacgggcacctacacccagtacaggacacaggactacccgtcggtgcccaccctggtgcgcctgctcgccaagcacaacatcatccccatctttgctgtcaccaactactcctatagctactacgagaagcttcacacctatttccctgtctcctcactgggggtgctgcaggaggactcgtccaacatcgtggagctgctggaggaggccttcaatcggatccgctccaacctggacatccgggccctagacagcccccgaggccttcggacagaggtcacctccaagatgttccagaagacgaggactgggtcctttcacatccggcggggggaagtgggtatataccaggtgcagctgcgggcccttgagcacgtggatgggacgcacgtgtgccagctgccggaggaccagaagggcaacatccatctgaaaccttccttctccgacggcctcaagatggacgcgggcatcatctgtgatgtgtgcacctgcgagctgcaaaaagaggtgcggtcagctcgctgcagcttcaacggagacttcgtgtgcggacagtgtgtgtgcagcgagggctggagtggccagacctgcaactgctccaccggctctctgagtgacattcagccctgcctgcgggagggcgaggacaagccgtgctccggccgtggggagtgccagtgcgggcactgtgtgtgctacggcgaaggccgctacgagggtcagttctgcgagtatgacaacttccagtgtccccgcacttccgggttcctctgcaatgaccgaggacgctgctccatgggccagtgtgtgtgtgagcctggttggacaggcccaagctgtgactgtcccctcagcaatgccacctgcatcgacagcaatgggggcatctgtaatggacgtggccactgtgagtgtggccgctgccactgccaccagcagtcgctctacacggacaccatctgcgagatcaactactcggcgatccacccgggcctctgcgaggacctacgctcctgcgtgcagtgccaggcgtggggcaccggcgagaagaaggggcgcacgtgtgaggaatgcaacttcaaggtcaagatggtggacgagcttaagagagccgaggaggtggtggtgcgctgctccttccgggacgaggatgacgactgcacctacagctacaccatggaaggtgacggcgcccctgggcccaacagcactgtcctggtgcacaagaagaaggactgccctccgggctccttctggtggctcatccccctgctcctcctcctcctgccgctcctggccctgctactgctgctatgctggaagtactgtgcctgctgcaaggcctgcctggcacttctcccgtgctgcaaccgaggtcacatggtgggctttaaggaagaccactacatgctgcgggagaacctgatggcctctgaccacttggacacgcccatgctgcgcagcgggaacctcaagggccgtgacgtggtccgctggaaggtcaccaacaacatgcagcggcctggctttgccactcatgccgccagcatcaaccccacagagctggtgccctacgggctgtccttgcgcctggcccgcctttgcaccgagaacctgctgaagcctgacactcgggagtgcgcccagctgcgccaggaggtggaggagaacctgaacgaggtctacaggcagatctccggtgtacacaagctccagcagaccaagttccggcagcagcccaatgccgggaaaaagcaagaccacaccattgtggacacagtgctgatggcgccccgctcggccaagccggccctgctgaagcttacagagaagcaggtggaacagagggccttccacgacctcaaggtggcccccggctactacaccctcactgcagaccaggacgcccggggcatggtggagttccaggagggcgtggagctggtggacgtacgggtgcccctctttatccggcctgaggatgacgacgagaagcagctgctggtggaggccatcgacgtgcccgcaggcactgccaccctcggccgccgcctggtaaacatcaccatcatcaaggagcaagccagagacgtggtgtcctttgagcagcctgagttctcggtcagccgcggggaccaggtggcccgcatccctgtcatccggcgtgtcctggacggcgggaagtcccaggtctcctaccgcacacaggatggcaccgcgcagggcaaccgggactacatccccgtggagggtgagctgctgttccagcctggggaggcctggaaagagctgcaggtgaagctcctggagctgcaagaagttgactccctcctgcggggccgccaggtccgccgtttccacgtccagctcagcaaccctaagtttggggcccacctgggccagccccactccaccaccatcatcatcagggacccagatgaactggaccggagcttcacgagtcagatgttgtcatcacagccaccccctcacggcgacctgggcgccccgcagaaccccaatgctaaggccgctgggtccaggaagatccatttcaactggctgcccccttctggcaagccaatggggtacagggtaaagtactggattcagggtgactccgaatccgaagcccacctgctcgacagcaaggtgccctcagtggagctcaccaacctgtacccgtattgcgactatgagatgaaggtgtgcgcctacggggctcagggcgagggaccctacagctccctggtgtcctgccgcacccaccaggaagtgcccagcgagccagggcgtctggccttcaatgtcgtctcctccacggtgacccagctgagctgggctgagccggctgagaccaacggtgagatcacagcctacgaggtctgctatggcctggtcaacgatgacaaccgacctattgggcccatgaagaaagtgctggttgacaaccctaagaaccggatgctgcttattgagaaccttcgggagtcccagccctaccgctacacggtgaaggcgcgcaacggggccggctgggggcctgagcgggaggccatcatcaacctggccacccagcccaagaggcccatgtccatccccatcatccctgacatccctatcgtggacgcccagagcggggaggactacgacagcttccttatgtacagcgatgacgttctacgctctccatcgggcagccagaggcccagcgtctccgatgacactggctgcggctggaagttcgagcccctgctgggggaggagctggacctgcggcgcgtcacgtggcggctgcccccggagctcatcccgcgcctgtcggccagcagcgggcgctcctccgacgccgaggcgccccacgggcccccggacgacggcggcgcgggcgggaagggcggcagcctgccccgcagtgcgacacccgggccccccggagagcacctggtgaatggccggatggactttgccttcccgggcagcaccaactccctgcacaggatgaccacgaccagtgctgctgcctatggcacccacctgagcccacacgtgccccaccgcgtgctaagcacatcctccaccctcacacgggactacaactcactgacccgctcagaacactcacactcgaccacactgccgagggactactccaccctcacctccgtctcctcccacgactctcgcctgactgctggtgtgcccgacacgcccacccgcctggtgttctctgccctggggcccacatctctcagagtgagctggcaggagccgcggtgcgagcggccgctgcagggctacagtgtggagtaccagctgctgaacggcggtgagctgcatcggctcaacatccccaaccctgcccagacctcggtggtggtggaagacctcctgcccaaccactcctacgtgttccgcgtgcgggcccagagccaggaaggctggggccgagagcgtgagggtgtcatcaccattgaatcccaggtgcacccgcagagcccactgtgtcccctgccaggctccgccttcactttgagcactcccagtgccccaggcccgctggtgttcactgccctgagcccagactcgctgcagctgagctgggagcggccacggaggcccaatggggatatcgtcggctacctggtgacctgtgagatggcccaaggaggagggccagccaccgcattccgggtggatggagacagccccgagagccggctgaccgtgccgggcctcagcgagaacgtgccctacaagttcaaggtgcaggccaggaccactgagggcttcgggccagagcgcgagggcatcatcaccatagagtcccaggatggaggacccttcccgcagctgggcagccgtgccgggctcttccagcacccgctgcaaagcgagtacagcagcatcaccaccacccacaccagcgccaccgagcccttcctagtggatgggctgaccctgggggcccagcacctggaggcaggcggctccctcacccggcatgtgacccaggagtttgtgagccggacactgaccaccagcggaacccttagcacccacatggaccaacagttcttccaaacttgaccgcaccctgccccacccccgccacgtcccactaggcgtcctcccgactcctctcccggagcctcctcagctactccatccttgcacccctgggggcccagcccacccgcatgcacagagcaggggctaggtgtctcctgggaggcatgaagggggcaaggtccgtcctctgtgggcccaaacctatttgtaaccaaagagctgggagcagcacaaggacccagcctttgttctgcacttaataaatggttttgctactgcta

SEQ ID NO: 963 - DNA, 5994 bp, Homo sapiens
gcgctgcccgcctcgtccccaccccccaaccccccgcgcccgccctcggacagtccctgctcgcccgcgcgctgcagccccatctcctagcggcagcccaggcgcggagggagcgagtccgccccgaggtaggtccaggacgggcgcacagcagcagccgaggctggccgggagagggaggaagaggatggcagggccacgccccagcccatgggccaggctgctcctggcagccttgatcagcgtcagcctctctgggaccttggcaaaccgctgcaagaaggccccagtgaagagctgcacggagtgtgtccgtgtggataaggactgcgcctactgcacagacgagatgttcagggaccggcgctgcaacacccaggcggagctgctggccgcgggctgccagcgggagagcatcgtggtcatggagagcagcttccaaatcacagaggagacccagattgacaccaccctgcggcgcagccagatgtccccccaaggcctgcgggtccgtctgcggcccggtgaggagcggcattttgagctggaggtgtttgagccactggagagccccgtggacctgtacatcctcatggacttctccaactccatgtccgatgatctggacaacctcaagaagatggggcagaacctggctcgggtcctgagccagctcaccagcgactacactattggatttggcaagtttgtggacaaagtcagcgtcccgcagacggacatgaggcctgagaagctgaaggagccctggcccaacagtgacccccccttctccttcaagaacgtcatcagcctgacagaagatgtggatgagttccggaataaactgcagggagagcggatctcaggcaacctggatgctcctgagggcggcttcgatgccatcctgcagacagctgtgtgcacgagggacattggctggcgcccggacagcacccacctgctggtcttctccaccgagtcagccttccactatgaggctgatggcgccaacgtgctggctggcatcatgagccgcaacgatgaacggtgccacctggacaccacgggcacctacacccagtacaggacacaggactacccgtcggtgcccaccctggtgcgcctgctcgccaagcacaacatcatccccatctttgctgtcaccaactactcctatagctactacgagaagcttcacacctatttccctgtctcctcactgggggtgctgcaggaggactcgtccaacatcgtggagctgctggaggaggccttcaatcggatccgctccaacctggacatccgggccctagacagcccccgaggccttcggacagaggtcacctccaagatgttccagaagacgaggactgggtcctttcacatccggcggggggaagtgggtatataccaggtgcagctgcgggcccttgagcacgtggatgggacgcacgtgtgccagctgccggaggaccagaagggcaacatccatctgaaaccttccttctccgacggcctcaagatggacgcgggcatcatctgtgatgtgtgcacctgcgagctgcaaaaagaggtgcggtcagctcgctgcagcttcaacggagacttcgtgtgcggacagtgtgtgtgcagcgagggctggagtggccagacctgcaactgctccaccggctctctgagtgacattcagccctgcctgcgggagggcgaggacaagccgtgctccggccgtggggagtgccagtgcgggcactgtgtgtgctacggcgaaggccgctacgagggtcagttctgcgagtatgacaacttccagtgtccccgcacttccgggttcctgtgcaatgaccgaggacgctgctccatgggccagtgtgtgtgtgagcctggttggacaggcccaagctgtgactgtcccctcagcaatgccacctgcatcgacagcaatgggggcatctgtaatggacgtggccactgtgagtgtggccgctgccactgccaccagcagtcgctctacacggacaccatctgcgagatcaactactcggcgatccacccgggcctctgcgaggacctacgctcctgcgtgcagtgccaggcgtggggcaccggcgagaagaaggggcgcacgtgtgaggaatgcaacttcaaggtcaagatggtggacgagcttaagagagccgaggaggtggtggtgcgctgctccttccgggacgaggatgacgactgcacctacagctacaccatggaaggtgacggcgcccctgggcccaacagcactgtcctggtgcacaagaagaaggactgccctccgggctccttctggtggctcatccccctgctcctcctcctcctgccgctcctggccctgctactgctgctatgctggaagtactgtgcctgctgcaaggcctgcctggcacttctcccgtgctgcaaccgaggtcacatggtgggctttaaggaagaccactacatgctgcgggagaacctgatggcctctgaccacttggacacgcccatgctgcgcagcgggaacctcaagggccgtgacgtggtccgctggaaggtcaccaacaacatgcagcggcctggctttgccactcatgccgccagcatcaaccccacagagctggtgccctacgggctgtccttgcgcctggcccgcctttgcaccgagaacctgctgaagcctgacactcgggagtgcgcccagctgcgccaggaggtggaggagaacctgaacgaggtctacaggcagatctccggtgtacacaagctccagcagaccaagttccggcagcagcccaatgccgggaaaaagcaagaccacaccattgtggacacagtgctgatggcgccccgctcggccaagccggccctgctgaagcttacagagaagcaggtggaacagagggccttccacgacctcaaggtggcccccggctactacaccctcactgcagaccaggacgcccggggcatggtggagttccaggagggcgtggagctggtggacgtacgggtgcccctctttatccggcctgaggatgacgacgagaagcagctgctggtggaggccatcgacgtgcccgcaggcactgccaccctcggccgccgcctggtaaacatcaccatcatcaaggagcaagccagagacgtggtgtcctttgagcagcctgagttctcggtcagccgcggggaccaggtggcccgcatccctgtcatccggcgtgtcctggacggcgggaagtcccaggtctcctaccgcacacaggatggcaccgcgcagggcaaccgggactacatccccgtggagggtgagctgctgttccagcctggggaggcctggaaagagctgcaggtgaagctcctggagctgcaagaagttgactccctcctgcggggccgccaggtccgccgtttccacgtccagctcagcaaccctaagtttggggcccacctgggccagccccactccaccaccatcatcatcagggacccagatgaactggaccggagcttcacgagtcagatgttgtcatcacagccaccccctcacggcgacctgggcgccccgcagaaccccaatgctaaggccgctgggtccaggaagatccatttcaactggctgcccccttctggcaagccaatggggtacagggtaaagtactggattcagggcgactccgaatccgaagcccacctgctcgacagcaaggtgccctcagtggagctcaccaacctgtacccgtattgcgactatgagatgaaggtgtgcgcctacggggctcagggcgagggaccctacagctccctggtgtcctgccgcacccaccaggaagtgcccagcgagccagggcgtctggccttcaatgtcgtctcctccacggtgacccagctgagctgggctgagccggctgagaccaacggtgagatcacagcctacgaggtctgctatggcctggtcaacgatgacaaccgacctattgggcccatgaagaaagtgctggttgacaaccctaagaaccggatgctgcttattgagaaccttcgggagtcccagccctaccgctacacggtgaaggcgcgcaacggggccggctgggggcctgagcgggaggccatcatcaacctggccacccagcccaagaggcccatgtccatccccatcatccctgacatccctatcgtggacgcccagagcggggaggactacgacagcttccttatgtacagcgatgacgttctacgctctccatcgggcagccagaggcccagcgtctccgatgacactggctgcggctggaagttcgagcccctgctgggggaggagctggacctgcggcgcgtcacgtggcggctgcccccggagctcatcccgcgcctgtcggccagcagcgggcgctcctccgacgccgaggcccccacggccccccggacgacggcggcgcgggcgggaagggcggcagccgtgccccgcagtgcgacacccgggccccccggagagcacctggtgaatggccggatggactttgccttcccgggcagcaccaactccctgcacaggatgaccacgaccagtgctgctgcctatggcacccacctgagcccacacgtgccccaccgcgtgctaagcacatcctccaccctcacacgggactacaactcactgacccgctcagaacactcacactcgaccacactgcccagggactactccaccctcacctccgtctcctcccacgactctcgcctgactgctggtgtgcccgacacgcccacccgcctggtgttctctgccctggggcccacatctctcagagtgagctggcaggagccgcggtgcgagcggccgctgcagggctacagtgtggagtaccagctgctgaacggcggtgagctgcatcggctcaacatccccaaccctgcccagacctcggtggtggtggaagacctcctgcccaaccactcctacgtgttccgcgtgcgggcccagagccaggaaggctggggccgagagcgtgagggtgtcatcaccattgaatcccaggtgcacccgcagagcccactgtgtcccctgccaggctccgccttcactttgagcactcccagtgccccaggcccgctggtgttcactgccctgagcccagactcgctgcagctgagctgggagcggccacggaggcccaatggggatatcgtcggctacctggtgacctgtgagatggcccaaggaggagggccagccaccgcattccgggtggatggagacagccccgagagccggctgaccgtgccgggcctcagcgagaacgtgccctacaagttcaaggtgcaggccaggaccactgagggcttcgggccagagcgcgagggcatcatcaccatagagtcccaggatggaggacccttcccgcagctgggcagccgtgccgggctcttccagcacccgctgcaaagcgagtacagcagcatcaccaccacccacaccagcgccaccgagcccttcctagtggatgggctgaccctgggggcccagcacctggaggcaggcggctccctcacccggcatgtgacccaggagtttgtgagccggacactgaccaccagcggaacccttagcacccacatggaccaacagttcttccaaacttgaccgcaccctgccccacccccgccatgtcccactaggcgtcctcccgactcctctcccggagcctcctcagctactccatccttgcacccctgggggcccagcccacccgcatgcacagagcaggggctaggtgtctcctgggaggcatgaagggggcaaggtccgtcctctgtgggcccaaacctatttgtaaccaaagagctgggagcagcacaaggacccagcctttgttctgcacttaataaatggttttgctactgctaaaaaaaaaaaaaaaaaaaaaaaaaaaaaaaaaaaaaaaaaaaaaaaaaaaaaaaaaaaaaaaaaaaaaaaaaaaa

SEQ ID NO: 964 - DNA, 5920 bp, Homo sapiens
gccctcggacagtccctgctcgcccgcgcgctgcagccccatctcctagcggcagcccaggcgcggagggagcgagtccgccccgaggaggaagaggatggcagggccacgccccagcccatgggccaggctgctcctggcagccttgatcagcgtcagcctctctgggaccttggcaaaccgctgcaagaaggccccagtgaagagctgcacggagtgtgtccgtgtggataaggactgcgcctactgcacagacgagatgttcagggaccggcgctgcaacacccaggcggagctgctggccgcgggctgccagcgggagagcatcgtggtcatggagagcagcttccaaatcacagaggagacccagattgacaccaccctgcggcgcagccagatgtccccccaaggcctgcgggtccgtctgcggcccggtgaggagcggcattttgagctggaggtgtttgagccactggagagccccgtggacctgtacatcctcatggacttctccaactccatgtccgatgatctggacaacctcaagaagatggggcagaacctggctcgggtcctgagccagctcaccagcgactacactattggatttggcaagtttgtggacaaagtcagcgtcccgcagacggacatgaggcctgagaagctgaaggagccctggcccaacagtgacccccccttctccttcaagaacgtcatcagcctgacagaagatgtggatgagttccggaataaactgcagggagagcggatctcaggcaacctggatgctcctgagggcggcttcgatgccatcctgcagacagctgtgtgcacgagggacattggctggcgcccggacagcacccacctgctggtcttctccaccgagtcagccttccactatgaggctgatggcgccaacgtgctggctggcatcatgagccgcaacgatgaacggtgccacctggacaccacgggcacctacacccagtacaggacacaggactacccgtcggtgcccaccctggtgcgcctgctcgccaagcacaacatcatccccatctttgctgtcaccaactactcctatagctactacgagaagcttcacacctatttccctgtctcctcactgggggtgctgcaggaggactcgtccaacatcgtggagctgctggaggaggccttcaatcggatccgctccaacctggacatccgggccctagacagcccccgaggccttcggacagaggtcacctccaagatgttccagaagacgaggactgggtcctttcacatccggcggggggaagtgggtatataccaggtgcagctgcgggcccttgagcacgtggatgggacgcacgtgtgccagctgccggaggaccagaagggcaacatccatctgaaaccttccttctccgacggcctcaagatggacgcgggcatcatctgtgatgtgtgcacctgcgagctgcaaaaagaggtgcggtcagctcgctgcagcttcaacggagacttcgtgtgcggacagtgtgtgtgcagcgagggctggagtggccagacctgcaactgctccaccggctctctgagtgacattcagccctgcctgcgggagggcgaggacaagccgtgctccggccgtggggagtgccagtgcgggcactgtgtgtgctacggcgaaggccgctacgagggtcagttctgcgagtatgacaacttccagtgtccccgcacttccgggttcctctgcaatgaccgaggacgctgctccatgggccagtgtgtgtgtgagcctggttggacaggcccaagctgtgactgtcccctcagcaatgccacctgcatcgacagcaatgggatccacccgggcctctgcgaggacctacgctcctgcgtgcagtgccaggcgtggggcaccggcgagaagaaggggcgcacgtgtgaggaatgcaacttcaaggtcaagatggtggacgagcttaagagagccgaggaggtggtggtgcgctgctccttccgggacgaggatgacgactgcacctacagctacaccatggaaggtgacggcgcccctgggcccaacagcactgtcctggtgcacaagaagaagggcaccacctccccctgcctcctcctctccagactgccctccgggctccttctggtggctcatccccctgctcctcctcctcctgccgctcctggccctgctactgctgctatgctggaagtactgtgcctgctgcaaggcctgcctggcacttctcccgtgctgcaaccgaggtcacatggtgggctttaaggaagaccactacatgctgcgggagaacctgatggcctctgaccacttggacacgcccatgctgcgcagcgggaacctcaagggccgtgacgtggtccgctggaaggtcaccaacaacatgcagcggcctggctttgccactcatgccgccagcatcaaccccacagagctggtgccctacgggctgtccttgcgcctggcccgcctttgcaccgagaacctgctgaagcctgacactcgggagtgcgcccagctgcgccaggaggtggaggagaacctgaacgaggtctacaggcagatctccggtgtacacaagctccagcagaccaagttccggcagcagcccaatgccgggaaaaagcaagaccacaccattgtggacacagtgctgatggcgccccgctcggccaagccggccctgctgaagcttacagagaagcaggtggaacagagggccttccacgacctcaaggtggcccccggctactacaccctcactgcagaccaggacgcccggggcatggtggagttccaggagggcgtggagctggtggacgtacgggtgcccctctttatccggcctgaggatgacgacgagaagcagctgctggtggaggccatcgacgtgcccgcaggcactgccaccctcggccgccgcctggtaaacatcaccatcatcaaggagcaagccagagacgtggtgtcctttgagcagcctgagttctcggtcagccgcggggaccaggtggcccgcatccctgtcatccggcgtgtcctggacggcgggaagtcccaggtctcctaccgcacacaggatggcaccgcgcagggcaaccgggactacatccccgtggagggtgagctgctgttccagcctggggaggcctggaaagagctgcaggtgaagctcctggagctgcaagaagttgactccctcctgcggggccgccaggtccgccgtttccacgtccagctcagcaaccctaagtttggggcccacctgggccagccccactccaccaccatcatcatcagggacccagatgaactggaccggagcttcacgagtcagatgttgtcatcacagccaccccctcacggcgacctgggcgccccgcagaaccccaatgctaaggccgctgggtccaggaagatccatttcaactggctgcccccttctggcaagccaatggggtacagggtaaagtactggattcagggtgactccgaatccgaagcccacctgctcgacagcaaggtgccctcagtggagctcaccaacctgtacccgtattgcgactatgagatgaaggtgtgcgcctacggggctcagggcgagggaccctacagctccctggtgtcctgccgcacccaccaggaagtgcccagcgagccagggcgtctggccttcaatgtcgtctcctccacggtgacccagctgagctgggctgagccggctgagaccaacggtgagatcacagcctacgaggtctgctatggcctggtcaacgatgacaaccgacctattgggcccatgaagaaagtgctggttgacaaccctaagaaccggatgctgcttattgagaaccttcgggagtcccagccctaccgctacacggtgaaggcgcgcaacggggccggctgggggcctgagcgggaggccatcatcaacctggccacccagcccaagaggcccatgtccatccccatcatccctgacatccctatcgtggacgcccagagcggggaggactacgacagcttccttatgtacagcgatgacgttctacgctctccatcgggcagccagaggcccagcgtctccgatgacactggctgcggctggaagttcgagcccctgctgggggaggagctggacctgcggcgcgtcacgtggcggctgcccccggagctcatcccgcgcctgtcggccagcagcgggcgctcctccgacgccgaggcgccccacgggcccccggacgacggcggcgcgggcgggaagggcggcagcctgccccgcagtgcgacacccgggccccccggagagcacctggtgaatggccggatggactttgccttcccgggcagcaccaactccctgcacaggatgaccacgaccagtgctgctgcctatggcacccacctgagcccacacgtgccccaccgcgtgctaagcacatcctccaccctcacacgggactacaactcactgacccgctcagaacactcacactcgaccacactgccgagggactactccaccctcacctccgtctcctcccacggcctccctcccatctgggaacacgggaggagcaggcttccgctgtcctgggccctggggtcccggagtcgggctcagatgaaagggttccccccttccaggggcccacgagactctataatcctggctgggaggccagcagcgccctcctggggcccagactctcgcctgactgctggtgtgcccgacacgcccacccgcctggtgttctctgccctggggcccacatctctcagagtgagctggcaggagccgcggtgcgagcggccgctgcagggctacagtgtggagtaccagctgctgaacggcggtgagctgcatcggctcaacatccccaaccctgcccagacctcggtggtggtggaagacctcctgcccaaccactcctacgtgttccgcgtgcgggcccagagccaggaaggctggggccgagagcgtgagggtgtcatcaccattgaatcccaggtgcacccgcagagcccactgtgtcccctgccaggctccgccttcactttgagcactcccagtgccccaggcccgctggtgttcactgccctgagcccagactcgctgcagctgagctgggagcggccacggaggcccaatggggatatcgtcggctacctggtgacctgtgagatggcccaaggaggagggccagccaccgcattccgggtggatggagacagccccgagagccggctgaccgtgccgggcctcagcgagaacgtgccctacaagttcaaggtgcaggccaggaccactgagggcttcgggccagagcgcgagggcatcatcaccatagagtcccaggatggaggacccttcccgcagctgggcagccgtgccgggctcttccagcacccgctgcaaagcgagtacagcagcatcaccaccacccacaccagcgccaccgagcccttcctagtggatgggctgaccctgggggcccagcacctggaggcaggcggctccctcacccggcatgtgacccaggagtttgtgagccggacactgaccaccagcggaacccttagcacccacatggaccaacagttcttccaaacttgaccgcaccctgccccacccccgccacgtcccactaggcgtcctcccgactcctctcccggagcctcctcagctactccatccttgcacccctgggggcccagcccacccgcatgcacagagcaggggctaggtgtctcctgggaggcatgaagggggcaaggtccgtcctctgtgggcccaaacctatttgtaaccaaagagctgggagcagcacaaggacccagcctttgttctgcacttaataaatggttttgctactgcta

SEQ ID NO: 965 - DNA, 5866 bp, Homo sapiens
gccctcggacagtccctgctcgcccgcgcgctgcagccccatctcctagcggcagcccaggcgcggagggagcgagtccgccccgaggaggaagaggatggcagggccacgccccagcccatgggccaggctgctcctggcagccttgatcagcgtcagcctctctgggaccttggcaaaccgctgcaagaaggccccagtgaagagctgcacggagtgtgtccgtgtggataaggactgcgcctactgcacagacgagatgttcagggaccggcgctgcaacacccaggcggagctgctggccgcgggctgccagcgggagagcatcgtggtcatggagagcagcttccaaatcacagaggagacccagattgacaccaccctgcggcgcagccagatgtccccccaaggcctgcgggtccgtctgcggcccggtgaggagcggcattttgagctggaggtgtttgagccactggagagccccgtggacctgtacatcctcatggacttctccaactccatgtccgatgatctggacaacctcaagaagatggggcagaacctggctcgggtcctgagccagctcaccagcgactacactattggatttggcaagtttgtggacaaagtcagcgtcccgcagacggacatgaggcctgagaagctgaaggagccctggcccaacagtgacccccccttctccttcaagaacgtcatcagcctgacagaagatgtggatgagttccggaataaactgcagggagagcggatctcaggcaacctggatgctcctgagggcggcttcgatgccatcctgcagacagctgtgtgcacgagggacattggctggcgcccggacagcacccacctgctggtcttctccaccgagtcagccttccactatgaggctgatggcgccaacgtgctggctggcatcatgagccgcaacgatgaacggtgccacctggacaccacgggcacctacacccagtacaggacacaggactacccgtcggtgcccaccctggtgcgcctgctcgccaagcacaacatcatccccatctttgctgtcaccaactactcctatagctactacgagaagcttcacacctatttccctgtctcctcactgggggtgctgcaggaggactcgtccaacatcgtggagctgctggaggaggccttcaatcggatccgctccaacctggacatccgggccctagacagcccccgaggccttcggacagaggtcacctccaagatgttccagaagacgaggactgggtcctttcacatccggcggggggaagtgggtatataccaggtgcagctgcgggcccttgagcacgtggatgggacgcacgtgtgccagctgccggaggaccagaagggcaacatccatctgaaaccttccttctccgacggcctcaagatggacgcgggcatcatctgtgatgtgtgcacctgcgagctgcaaaaagaggtgcggtcagctcgctgcagcttcaacggagacttcgtgtgcggacagtgtgtgtgcagcgagggctggagtggccagacctgcaactgctccaccggctctctgagtgacattcagccctgcctgcgggagggcgaggacaagccgtgctccggccgtggggagtgccagtgcgggcactgtgtgtgctacggcgaaggccgctacgagggtcagttctgcgagtatgacaacttccagtgtccccgcacttccgggttcctctgcaatgaccgaggacgctgctccatgggccagtgtgtgtgtgagcctggttggacaggcccaagctgtgactgtcccctcagcaatgccacctgcatcgacagcaatgggggcatctgtaatggacgtggccactgtgagtgtggccgctgccactgccaccagcagtcgctctacacggacaccatctgcgagatcaactactcggcgatccacccgggcctctgcgaggacctacgctcctgcgtgcagtgccaggcgtggggcaccggcgagaagaaggggcgcacgtgtgaggaatgcaacttcaaggtcaagatggtggacgagcttaagagagccgaggaggtggtggtgcgctgctccttccgggacgaggatgacgactgcacctacagctacaccatggaaggtgacggcgcccctgggcccaacagcactgtcctggtgcacaagaagaaggactgccctccgggctccttctggtggctcatccccctgctcctcctcctcctgccgctcctggccctgctactgctgctatgctggaagtactgtgcctgctgcaaggcctgcctggcacttctcccgtgctgcaaccgaggtcacatggtgggctttaaggaagaccactacatgctgcgggagaacctgatggcctctgaccacttggacacgcccatgctgcgcagcgggaacctcaagggccgtgacgtggtccgctggaaggtcaccaacaacatgcagcggcctggctttgccactcatgccgccagcatcaaccccacagagctggtgccctacgggctgtccttgcgcctggcccgcctttgcaccgagaacctgctgaagcctgacactcgggagtgcgcccagctgcgccaggaggtggaggagaacgtaaggacccaggaactaggcctggccggagatgtggctgaacgaggtctacaggcagatctccggtgtacacaagctccagcagaccaagttccggcagcagcccaatgccgggaaaaagcaagaccacaccattgtggacacagtgctgatggcgccccgctcggccaagccggccctgctgaagcttacagagaagcaggtggaacagagggccttccacgacctcaaggtggcccccggctactacaccctcactgcagaccaggacgcccggggcatggtggagttccaggagggcgtggagctggtggacgtacgggtgcccctctttatccggcctgaggatgacgacgagaagcagctgctggtggaggccatcgacgtgcccgcaggcactgccaccctcggccgccgcctggtaaacatcaccatcatcaaggagcaagccagagacgtggtgtcctttgagcagcctgagttctcggtcagccgcggggaccaggtggcccgcatccctgtcatccggcgtgtcctggacggcgggaagtcccaggtctcctaccgcacacaggatggcaccgcgcagggcaaccgggactacatccccgtggagggtgagctgctgttccagcctggggaggcctggaaagagctgcaggtgaagctcctggagctgcaagaagttgactccctcctgcggggccgccaggtccgccgtttccacgtccagctcagcaaccctaagtttggggcccacctgggccagccccactccaccaccatcatcatcagggacccagatgaactggaccggagcttcacgagtcagatgttgtcatcacagccaccccctcacggcgacctgggcgccccgcagaaccccaatgctaaggccgctgggtccaggaagatccatttcaactggctgcccccttctggcaagccaatggggtacagggtaaagtactggattcagggtgactccgaatccgaagcccacctgctcgacagcaaggtgccctcagtggagctcaccaacctgtacccgtattgcgactatgagatgaaggtgtgcgcctacggggctcagggcgagggaccctacagctccctggtgtcctgccgcacccaccaggaagtgcccagcgagccagggcgtctggccttcaatgtcgtctcctccacggtgacccagctgagctgggctgagccggctgagaccaacggtgagatcacagcctacgaggtctgctatggcctggtcaacgatgacaaccgacctattgggcccatgaagaaagtgctggttgacaaccctaagaaccggatgctgcttattgagaaccttcgggagtcccagccctaccgctacacggtgaaggcgcgcaacggggccggctgggggcctgagcgggaggccatcatcaacctggccacccagcccaagaggcccatgtccatccccatcatccctgacatccctatcgtggacgcccagagcggggaggactacgacagcttccttatgtacagcgatgacgttctacgctctccatcgggcagccagaggcccagcgtctccgatgacactggctgcggctggaagttcgagcccctgctgggggaggagctggacctgcggcgcgtcacgtggcggctgcccccggagctcatcccgcgcctgtcggccagcagcgggcgctcctccgacgccgaggcgccccacgggcccccggacgacggcggcgcgggcgggaagggcggcagcctgccccgcagtgcgacacccgggccccccggagagcacctggtgaatggccggatggactttgccttcccgggcagcaccaactccctgcacaggatgaccacgaccagtgctgctgcctatggcacccacctgagcccacacgtgccccaccgcgtgctaagcacatcctccaccctcacacgggactacaactcactgacccgctcagaacactcacactcgaccacactgccgagggactactccaccctcacctccgtctcctcccacgactctcgcctgactgctggtgtgcccgacacgcccacccgcctggtgttctctgccctggggcccacatctctcagagtgagctggcaggagccgcggtgcgagcggccgctgcagggctacagtgtggagtaccagctgctgaacggcggtgagctgcatcggctcaacatccccaaccctgcccagacctcggtggtggtggaagacctcctgcccaaccactcctacgtgttccgcgtgcgggcccagagccaggaaggctggggccgagagcgtgagggtgtcatcaccattgaatcccaggtgcacccgcagagcccactgtgtcccctgccaggctccgccttcactttgagcactcccagtgccccaggcccgctggtgttcactgccctgagcccagactcgctgcagctgagctgggagcggccacggaggcccaatggggatatcgtcggctacctggtgacctgtgagatggcccaaggaggagggccagccaccgcattccgggtggatggagacagccccgagagccggctgaccgtgccgggcctcagcgagaacgtgccctacaagttcaaggtgcaggccaggaccactgagggcttcgggccagagcgcgagggcatcatcaccatagagtcccaggatggaggacccttcccgcagctgggcagccgtgccgggctcttccagcacccgctgcaaagcgagtacagcagcatcaccaccacccacaccagcgccaccgagcccttcctagtggatgggctgaccctgggggcccagcacctggaggcaggcggctccctcacccggcatgtgacccaggagtttgtgagccggacactgaccaccagcggaacccttagcacccacatggaccaacagttcttccaaacttgaccgcaccctgccccacccccgccacgtcccactaggcgtcctcccgactcctctcccggagcctcctcagctactccatccttgcacccctgggggcccagcccacccgcatgcacagagcaggggctaggtgtctcctgggaggcatgaagggggcaaggtccgtcctctgtgggcccaaacctatttgtaaccaaagagctgggagcagcacaaggacccagcctttgttctgcacttaataaatggttttgctactgcta

SEQ ID NO: 966 - DNA, 5648 bp, Homo sapiens
cgcccgcgcgctgcagccccatctcctagcggcagcccaggcgcggagggagcgagtccgccccgaggtaggtccaggacgggcgcacagcagcagccgaggctggccgggagagggaggaagaggatggcagggccacgccccagcccatgggccaggctgctcctggcagccttgatcagcgtcagcctctctgggaccttggcaaaccgctgcaagaaggccccagtgaagagctgcacggagtgtgtccgtgtggataaggactgcgcctactgcacagacgagatgttcagggaccggcgctgcaacacccaggcggagctgctggccgcgggctgccagcgggagagcatcgtggtcatggagagcagcttccaaatcacagaggagacccagattgacaccaccctgcggcgcagccagatgtccccccaaggcctgcgggtccgtctgcggcccggtgaggagcggcattttgagctggaggtgtttgagccactggagagccccgtggacctgtacatcctcatggacttctccaactccatgtccgatgatctggacaacctcaagaagatggggcagaacctggctcgggtcctgagccagctcaccagcgactacactattggatttggcaagtttgtggacaaagtcagcgtcccgcagacggacatgaggcctgagaagctgaaggagccctggcccaacagtgacccccccttctccttcaagaacgtcatcagcctgacagaagatgtggatgagttccggaataaactgcagggagagcggatctcaggcaacctggatgctcctgagggcggcttcgatgccatcctgcagacagctgtgtgcacgagggacattggctggcgcccggacagcacccacctgctggtcttctccaccgagtcagccttccactatgaggctgatggcgccaacgtgctggctggcatcatgagccgcaacgatgaacggtgccacctggacaccacgggcacctacacccagtacaggacacaggactacccgtcggtgcccaccctggtgcgcctgctcgccaagcacaacatcatccccatctttgctgtcaccaactactcctatagctactacgagaagcttcacacctatttccctgtctcctcactgggggtgctgcaggaggactcgtccaacatcgtggagctgctggaggaggccttcaatcggatccgctccaacctggacatccgggccctagacagcccccgaggccttcggacagaggtcacctccaagatgttccagaagacgaggactgggtcctttcacatccggcggggggaagtgggtatataccaggtgcagctgcgggcccttgagcacgtggatgggacgcacgtgtgccagctgccggaggaccagaagggcaacatccatctgaaaccttccttctccgacggcctcaagatggacgcgggcatcatctgtgatgtgtgcacctgcgagctgcaaaaagaggtgcggtcagctcgctgcagcttcaacggagacttcgtgtgcggacagtgtgtgtgcagcgagggctggagtggccagacctgcaactgctccaccggctctctgagtgacattcagccctgcctgcgggagggcgaggacaagccgtgctccggccgtggggagtgccagtgcgggcactgtgtgtgctacggcgaaggccgctacgagggtcagttctgcgagtatgacaacttccagtgtccccgcacttccgggttcctctgcaatgaccgaggacgctgctccatgggccagtgtgtgtgtgagcctggttggacaggcccaagctgtgactgtcccctcagcaatgccacctgcatcgacagcaatgggggcatctgtaatggacgtggccactgtgagtgtggccgctgccactgccaccagcagtcgctctacacggacaccatctgcgagatcaactactcggcgatccacccgggcctctgcgaggacctacgctcctgcgtgcagtgccaggcgtggggcaccggcgagaagaaggggcgcacgtgtgaggaatgcaacttcaaggtcaagatggtggacgagcttaagagagccgaggaggtggtggtgcgctgctccttccgggacgaggatgacgactgcacctacagctacaccatggaaggtgacggcgcccctgggcccaacagcactgtcctggtgcacaagaagaaggactgccctccgggctccttctggtggctcatccccctgctcctcctcctcctgccgctcctggccctgctactgctgctatgctggaagtactgtgcctgctgcaaggcctgcctggcacttctcccgtgctgcaaccgaggtcacatggtgggctttaaggaagaccactacatgctgcgggagaacctgatggcctctgaccacttggacacgcccatgctgcgcagcgggaacctcaagggccgtgacgtggtccgctggaaggtcaccaacaacatgcagcggcctggctttgccactcatgccgccagcatcaaccccacagagctggtgccctacgggctgtccttgcgcctggcccgcctttgcaccgagaacctgctgaagcctgacactcgggagtgcgcccagctgcgccaggaggtggaggagaacctgaacgaggtctacaggcagatctccggtgtacacaagctccagcagaccaagttccggcagcagcccaatgccgggaaaaagcaagaccacaccattgtggacacagtgctgatggcgccccgctcggccaagccggccctgctgaagcttacagagaagcaggtggaacagagggccttccacgacctcaaggtggcccccggctactacaccctcactgcagaccaggacgcccggggcatggtggagttccaggagggcgtggagctggtggacgtacgggtgcccctctttatccggcctgaggatgacgacgagaagcagctgctggtggaggccatcgacgtgcccgcaggcactgccaccctcggccgccgcctggtaaacatcaccatcatcaaggagcaagccagagacgtggtgtcctttgagcagcctgagttctcggtcagccgcggggaccaggtggcccgcatccctgtcatccggcgtgtcctggacggcgggaagtcccaggtctcctaccgcacacaggatggcaccgcgcagggcaaccgggactacatccccgtggagggtgagctgctgttccagcctggggaggcctggaaagagctgcaggtgaagctcctggagctgcaagaagttgactccctcctgcggggccgccaggtccgccgtttccacgtccagctcagcaaccctaagtttggggcccacctgggccagccccactccaccaccatcatcatcagggacccagatgaactggaccggagcttcacgagtcagatgttgtcatcacagccaccccctcacggcgacctgggcgccccgcagaaccccaatgctaaggccgctgggtccaggaagatccatttcaactggctgcccccttctggcaagccaatggggtacagggtaaagtactggattcagggtgactccgaatccgaagcccacctgctcgacagcaaggtgccctcagtggagctcaccaacctgtacccgtattgcgactatgagatgaaggtgtgcgcctacggggctcagggcgagggaccctacagctccctggtgtcctgccgcacccaccaggaagtgcccagcgagccagggcgtctggccttcaatgtcgtctcctccacggtgacccagctgagctgggctgagccggctgagaccaacggtgagatcacagcctacgaggtctgctatggcctggtcaacgatgacaaccgacctattgggcccatgaagaaagtgctggttgacaaccctaagaaccggatgctgcttattgagaaccttcgggagtcccagccctaccgctacacggtgaaggcgcgcaacggggccggctgggggcctgagcgggaggccatcatcaacctggccacccagcccaagaggcccatgtccatccccatcatccctgacatccctatcgtggacgcccagagcggggaggactacgacagcttccttatgtacagcgatgacgttctacgctctccatcgggcagccagaggcccagcgtctccgatgacactgagcacctggtgaatggccggatggactttgccttcccgggcagcaccaactccctgcacaggatgaccacgaccagtgctgctgcctatggcacccacctgagcccacacgtgccccaccgcgtgctaagcacatcctccaccctcacacgggactacaactcactgacccgctcagaacactcacactcgaccacactgccgagggactactccaccctcacctccgtctcctcccacgactctcgcctgactgctggtgtgcccgacacgcccacccgcctggtgttctctgccctggggcccacatctctcagagtgagctggcaggagccgcggtgcgagcggccgctgcagggctacagtgtggagtaccagctgctgaacggcggtgagctgcatcggctcaacatccccaaccctgcccagacctcggtggtggtggaagacctcctgcccaaccactcctacgtgttccgcgtgcgggcccagagccaggaaggctggggccgagagcgtgagggtgtcatcaccattgaatcccaggtgcacccgcagagcccactgtgtcccctgccaggctccgccttcactttgagcactcccagtgccccaggcccgctggtgttcactgccctgagcccagactcgctgcagctgagctgggagcggccacggaggcccaatggggatatcgtcggctacctggtgacctgtgagatggcccaaggaggagggccagccaccgcattccgggtggatggagacagccccgagagccggctgaccgtgccgggcctcagcgagaacgtgccctacaagttcaaggtgcaggccaggaccactgagggcttcgggccagagcgcgagggcatcatcaccatagagtcccaggatggaggacccttcccgcagctgggcagccgtgccgggctcttccagcacccgctgcaaagcgagtacagcagcatcaccaccacccacaccagcgccaccgagcccttcctagtggatgggctgaccctgggggcccagcacctggaggcaggcggctccctcacccggcatgtgacccaggagtttgtgagccggacactgaccaccagcggaacccttagcacccacatggaccaacagttcttccaaacttgaccgcaccctgccccacccccgccacgtcccactaggcgtcctcccgactcctctcccggagcctcctcagctactccatccttgcacccctgggggcccagcccacccgcatgcacagagcaggggctaggtgtctcctgggaggcatgaagggggcaaggtccgtcctctgtgggcccaaacctatttgtaaccaaagagctgggagcagcacaaggacccagcctttgttctgcacttaataaatggttttgctactgcta

SEQ ID NO: 967 - DNA, 6017 bp, Homo sapiens
cgcccgcgcgctgcagccccatctcctagcggcagcccaggcgcggagggagcgagtccgccccgaggtaggtccaggacgggcgcacagcagcagccgaggctggccgggagagggaggaagaggatggcagggccacgccccagcccatgggccaggctgctcctggcagccttgatcagcgtcagcctctctgggaccttggcaaaccgctgcaagaaggccccagtgaagagctgcacggagtgtgtccgtgtggataaggactgcgcctactgcacagacgagatgttcagggaccggcgctgcaacacccaggcggagctgctggccgcgggctgccagcgggagagcatcgtggtcatggagagcagcttccaaatcacagaggagacccagattgacaccaccctgcggcgcagccagatgtccccccaaggcctgcgggtccgtctgcggcccggtgaggagcggcattttgagctggaggtgtttgagccactggagagccccgtggacctgtacatcctcatggacttctccaactccatgtccgatgatctggacaacctcaagaagatggggcagaacctggctcgggtcctgagccagctcaccagcgactacactattggatttggcaagtttgtggacaaagtcagcgtcccgcagacggacatgaggcctgagaagctgaaggagccctggcccaacagtgacccccccttctccttcaagaacgtcatcagcctgacagaagatgtggatgagttccggaataaactgcagggagagcggatctcaggcaacctggatgctcctgagggcggcttcgatgccatcctgcagacagctgtgtgcacgagggacattggctggcgcccggacagcacccacctgctggtcttctccaccgagtcagccttccactatgaggctgatggcgccaacgtgctggctggcatcatgagccgcaacgatgaacggtgccacctggacaccacgggcacctacacccagtacaggacacaggactacccgtcggtgcccaccctggtgcgcctgctcgccaagcacaacatcatccccatctttgctgtcaccaactactcctatagctactacgagaagcttcacacctatttccctgtctcctcactgggggtgctgcaggaggactcgtccaacatcgtggagctgctggaggaggccttcaatcggatccgctccaacctggacatccgggccctagacagcccccgaggccttcggacagaggtcacctccaagatgttccagaagacgaggactgggtcctttcacatccggcggggggaagtgggtatataccaggtgcagctgcgggcccttgagcacgtggatgggacgcacgtgtgccagctgccggaggaccagaagggcaacatccatctgaaaccttccttctccgacggcctcaagatggacgcgggcatcatctgtgatgtgtgcacctgcgagctgcaaaaagaggtgcggtcagctcgctgcagcttcaacggagacttcgtgtgcggacagtgtgtgtgcagcgagggctggagtggccagacctgcaactgctccaccggctctctgagtgacattcagccctgcctgcgggagggcgaggacaagccgtgctccggccgtggggagtgccagtgcgggcactgtgtgtgctacggcgaaggccgctacgagggtcagttctgcgagtatgacaacttccagtgtccccgcacttccgggttcctctgcaatgaccgaggacgctgctccatgggccagtgtgtgtgtgagcctggttggacaggcccaagctgtgactgtcccctcagcaatgccacctgcatcgacagcaatgggggcatctgtaatggacgtggccactgtgagtgtggccgctgccactgccaccagcagtcgctctacacggacaccatctgcgagatcaactactcggcgatccacccgggcctctgcgaggacctacgctcctgcgtgcagtgccaggcgtggggcaccggcgagaagaaggggcgcacgtgtgaggaatgcaacttcaaggtcaagatggtggacgagcttaagagagccgaggaggtggtggtgcgctgctccttccgggacgaggatgacgactgcacctacagctacaccatggaaggtgacggcgcccctgggcccaacagcactgtcctggtgcacaagaagaaggactgccctccgggctccttctggtggctcatccccctgctcctcctcctcctgccgctcctggccctgctactgctgctatgctggaagtactgtgcctgctgcaaggcctgcctggcacttctcccgtgctgcaaccgaggtcacatggtgggctttaaggaagaccactacatgctgcgggagaacctgatggcctctgaccacttggacacgcccatgctgcgcagcgggaacctcaagggccgtgacgtggtccgctggaaggtcaccaacaacatgcagcggcctggctttgccactcatgccgccagcatcaaccccacagagctggtgccctacgggctgtccttgcgcctggcccgcctttgcaccgagaacctgctgaagcctgacactcgggagtgcgcccagctgcgccaggaggtggaggagaacctgaacgaggtctacaggcagatctccggtgtacacaagctccagcagaccaagttccggcagcagcccaatgccgggaaaaagcaagaccacaccattgtggacacagtgctgatggcgccccgctcggccaagccggccctgctgaagcttacagagaagcaggtggaacagagggccttccacgacctcaaggtggcccccggctactacaccctcactgcagaccaggacgcccggggcatggtggagttccaggagggcgtggagctggtggacgtacgggtgcccctctttatccggcctgaggatgacgacgagaagcagctgctggtggaggccatcgacgtgcccgcaggcactgccaccctcggccgccgcctggtaaacatcaccatcatcaaggagcaagccagagacgtggtgtcctttgagcagcctgagttctcggtcagccgcggggaccaggtggcccgcatccctgtcatccggcgtgtcctggacggcgggaagtcccaggtctcctaccgcacacaggatggcaccgcgcagggcaaccgggactacatccccgtggagggtgagctgctgttccagcctggggaggcctggaaagagctgcaggtgaagctcctggagctgcaagaagttgactccctcctgcggggccgccaggtccgccgtttccacgtccagctcagcaaccctaagtttggggcccacctgggccagccccactccaccaccatcatcatcagggacccagatgaactggaccggagcttcacgagtcagatgttgtcatcacagccaccccctcacggcgacctgggcgccccgcagaaccccaatgctaaggccgctgggtccaggaagatccatttcaactggctgcccccttctggcaagccaatggggtacagggtaaagtactggattcagggtgactccgaatccgaagcccacctgctcgacagcaaggtgccctcagtggagctcaccaacctgtacccgtattgcgactatgagatgaaggtgtgcgcctacggggctcagggcgagggaccctacagctccctggtgtcctgccgcacccaccaggaagtgcccagcgagccagggcgtctggccttcaatgtcgtctcctccacggtgacccagctgagctgggctgagccggctgagaccaacggtgagatcacagcctacgaggtctgctatggcctggtcaacgatgacaaccgacctattgggcccatgaagaaagtgctggttgacaaccctaagaaccggatgctgcttattgagaaccttcgggagtcccagccctaccgctacacggtgaaggcgcgcaacggggccggctgggggcctgagcgggaggccatcatcaacctggccacccagcccaagaggcccatgtccatccccatcatccctgacatccctatcgtggacgcccagagcggggaggactacgacagcttccttatgtacagcgatgacgttctacgctctccatcgggcagccagaggcccagcgtctccgatgacactggctgcggctggaagttcgagcccctgctgggggaggagctggacctgcggcgcgtcacgtggcggctgcccccggagctcatcccgcgcctgtcggccagcagcgggcgctcctccgacgccgaggcgccccacgggcccccggacgacggcggcgcgggcgggaagggcggcagcctgccccgcagtgcgacacccgggccccccggagagcacctggtgaatggccggatggactttgccttcccgggcagcaccaactccctgcacaggatgaccacgaccagtgctgctgcctatggcacccacctgagcccacacgtgccccaccgcgtgctaagcacatcctccaccctcacacgggactacaactcactgacccgctcagaacactcacactcgaccacactgccgagggactactccaccctcacctccgtctcctcccacggcctccctcccatctgggaacacgggaggagcaggcttccgctgtcctgggccctggggtcccggagtcgggctcagatgaaagggttccccccttccaggggcccacgagactctataatcctggctgggaggccagcagcgccctcctggggcccagactctcgcctgactgctggtgtgcccgacacgcccacccgcctggtgttctctgccctggggcccacatctctcagagtgagctggcaggagccgcggtgcgagcggccgctgcagggctacagtgtggagtaccagctgctgaacggcggtgagctgcatcggctcaacatccccaaccctgcccagacctcggtggtggtggaagacctcctgcccaaccactcctacgtgttccgcgtgcgggcccagagccaggaaggctggggccgagagcgtgagggtgtcatcaccattgaatcccaggtgcacccgcagagcccactgtgtcccctgccaggctccgccttcactttgagcactcccagtgccccaggcccgctggtgttcactgccctgagcccagactcgctgcagctgagctgggagcggccacggaggcccaatggggatatcgtcggctacctggtgacctgtgagatggcccaaggaggagggccagccaccgcattccgggtggatggagacagccccgagagccggctgaccgtgccgggcctcagcgagaacgtgccctacaagttcaaggtgcaggccaggaccactgagggcttcgggccagagcgcgagggcatcatcaccatagagtcccaggatggaggacccttcccgcagctgggcagccgtgccgggctcttccagcacccgctgcaaagcgagtacagcagcatcaccaccacccacaccagcgccaccgagcccttcctagtggatgggctgaccctgggggcccagcacctggaggcaggcggctccctcacccggcatgtgacccaggagtttgtgagccggacactgaccaccagcggaacccttagcacccacatggaccaacagttcttccaaacttgaccgcaccctgccccacccccgccacgtcccactaggcgtcctcccgactcctctcccggagcctcctcagctactccatccttgcacccctgggggcccagcccacccgcatgcacagagcaggggctaggtgtctcctgggaggcatgaagggggcaaggtccgtcctctgtgggcccaaacctatttgtaaccaaagagctgggagcagcacaaggacccagcctttgttctgcacttaataaatggttttgctactgcta

SEQ ID NO: 968 - DNA, 5619 bp, Homo sapiens
gccctcggacagtccctgctcgcccgcgcgctgcagccccatctcctagcggcagcccaggcgcggagggagcgagtccgccccgaggaggaagaggatggcagggccacgccccagcccatgggccaggctgctcctggcagccttgatcagcgtcagcctctctgggaccttggcaaaccgctgcaagaaggccccagtgaagagctgcacggagtgtgtccgtgtggataaggactgcgcctactgcacagacgagatgttcagggaccggcgctgcaacacccaggcggagctgctggccgcgggctgccagcgggagagcatcgtggtcatggagagcagcttccaaatcacagaggagacccagattgacaccaccctgcggcgcagccagatgtccccccaaggcctgcgggtccgtctgcggcccggtgaggagcggcattttgagctggaggtgtttgagccactggagagccccgtggacctgtacatcctcatggacttctccaactccatgtccgatgatctggacaacctcaagaagatggggcagaacctggctcgggtcctgagccagctcaccagcgactacactattggatttggcaagtttgtggacaaagtcagcgtcccgcagacggacatgaggcctgagaagctgaaggagccctggcccaacagtgacccccccttctccttcaagaacgtcatcagcctgacagaagatgtggatgagttccggaataaactgcagggagagcggatctcaggcaacctggatgctcctgagggcggcttcgatgccatcctgcagacagctgtgtgcacgagggacattggctggcgcccggacagcacccacctgctggtcttctccaccgagtcagccttccactatgaggctgatggcgccaacgtgctggctggcatcatgagccgcaacgatgaacggtgccacctggacaccacgggcacctacacccagtacaggacacaggactacccgtcggtgcccaccctggtgcgcctgctcgccaagcacaacatcatccccatctttgctgtcaccaactactcctatagctactacgagaagcttcacacctatttccctgtctcctcactgggggtgctgcaggaggactcgtccaacatcgtggagctgctggaggaggccttcaatcggatccgctccaacctggacatccgggccctagacagcccccgaggccttcggacagaggtcacctccaagatgttccagaagacgaggactgggtcctttcacatccggcggggggaagtgggtatataccaggtgcagctgcgggcccttgagcacgtggatgggacgcacgtgtgccagctgccggaggaccagaagggcaacatccatctgaaaccttccttctccgacggcctcaagatggacgcgggcatcatctgtgatgtgtgcacctgcgagctgcaaaaagaggtgcggtcagctcgctgcagcttcaacggagacttcgtgtgcggacagtgtgtgtgcagcgagggctggagtggccagacctgcaactgctccaccggctctctgagtgacattcagccctgcctgcgggagggcgaggacaagccgtgctccggccgtggggagtgccagtgcgggcactgtgtgtgctacggcgaaggccgctacgagggtcagttctgcgagtatgacaacttccagtgtccccgcacttccgggttcctctgcaatgaccgaggacgctgctccatgggccagtgtgtgtgtgagcctggttggacaggcccaagctgtgactgtcccctcagcaatgccacctgcatcgacagcaatgggggcatctgtaatggacgtggccactgtgagtgtggccgctgccactgccaccagcagtcgctctacacggacaccatctgcgagatcaactactcggcgatccacccgggcctctgcgaggacctacgctcctgcgtgcagtgccaggcgtggggcaccggcgagaagaaggggcgcacgtgtgaggaatgcaacttcaaggtcaagatggtggacgagcttaagagagccgaggaggtggtggtgcgctgctccttccgggacgaggatgacgactgcacctacagctacaccatggaaggtgacggcgcccctgggcccaacagcactgtcctggtgcacaagaagaaggactgccctccgggctccttctggtggctcatccccctgctcctcctcctcctgccgctcctggccctgctactgctgctatgctggaagtactgtgcctgctgcaaggcctgcctggcacttctcccgtgctgcaaccgaggtcacatggtgggctttaaggaagaccactacatgctgcgggagaacctgatggcctctgaccacttggacacgcccatgctgcgcagcgggaacctcaagggccgtgacgtggtccgctggaaggtcaccaacaacatgcagcggcctggctttgccactcatgccgccagcatcaaccccacagagctggtgccctacgggctgtccttgcgcctggcccgcctttgcaccgagaacctgctgaagcctgacactcgggagtgcgcccagctgcgccaggaggtggaggagaacctgaacgaggtctacaggcagatctccggtgtacacaagctccagcagaccaagttccggcagcagcccaatgccgggaaaaagcaagaccacaccattgtggacacagtgctgatggcgccccgctcggccaagccggccctgctgaagcttacagagaagcaggtggaacagagggccttccacgacctcaaggtggcccccggctactacaccctcactgcagaccaggacgcccggggcatggtggagttccaggagggcgtggagctggtggacgtacgggtgcccctctttatccggcctgaggatgacgacgagaagcagctgctggtggaggccatcgacgtgcccgcaggcactgccaccctcggccgccgcctggtaaacatcaccatcatcaaggagcaagccagagacgtggtgtcctttgagcagcctgagttctcggtcagccgcggggaccaggtggcccgcatccctgtcatccggcgtgtcctggacggcgggaagtcccaggtctcctaccgcacacaggatggcaccgcgcagggcaaccgggactacatccccgtggagggtgagctgctgttccagcctggggaggcctggaaagagctgcaggtgaagctcctggagctgcaagaagttgactccctcctgcggggccgccaggtccgccgtttccacgtccagctcagcaaccctaagtttggggcccacctgggccagccccactccaccaccatcatcatcagggacccagatgaactggaccggagcttcacgagtcagatgttgtcatcacagccaccccctcacggcgacctgggcgccccgcagaaccccaatgctaaggccgctgggtccaggaagatccatttcaactggctgcccccttctggcaagccaatggggtacagggtaaagtactggattcagggtgactccgaatccgaagcccacctgctcgacagcaaggtgccctcagtggagctcaccaacctgtacccgtattgcgactatgagatgaaggtgtgcgcctacggggctcagggcgagggaccctacagctccctggtgtcctgccgcacccaccaggaagtgcccagcgagccagggcgtctggccttcaatgtcgtctcctccacggtgacccagctgagctgggctgagccggctgagaccaacggtgagatcacagcctacgaggtctgctatggcctggtcaacgatgacaaccgacctattgggcccatgaagaaagtgctggttgacaaccctaagaaccggatgctgcttattgagaaccttcgggagtcccagccctaccgctacacggtgaaggcgcgcaacggggccggctgggggcctgagcgggaggccatcatcaacctggccacccagcccaagaggcccatgtccatccccatcatccctgacatccctatcgtggacgcccagagcggggaggactacgacagcttccttatgtacagcgatgacgttctacgctctccatcgggcagccagaggcccagcgtctccgatgacactgagcacctggtgaatggccggatggactttgccttcccgggcagcaccaactccctgcacaggatgaccacgaccagtgctgctgcctatggcacccacctgagcccacacgtgccccaccgcgtgctaagcacatcctccaccctcacacgggactacaactcactgacccgctcagaacactcacactcgaccacactgccgagggactactccaccctcacctccgtctcctcccacgactctcgcctgactgctggtgtgcccgacacgcccacccgcctggtgttctctgccctggggcccacatctctcagagtgagctggcaggagccgcggtgcgagcggccgctgcagggctacagtgtggagtaccagctgctgaacggcggtgagctgcatcggctcaacatccccaaccctgcccagacctcggtggtggtggaagacctcctgcccaaccactcctacgtgttccgcgtgcgggcccagagccaggaaggctggggccgagagcgtgagggtgtcatcaccattgaatcccaggtgcacccgcagagcccactgtgtcccctgccaggctccgccttcactttgagcactcccagtgccccaggcccgctggtgttcactgccctgagcccagactcgctgcagctgagctgggagcggccacggaggcccaatggggatatcgtcggctacctggtgacctgtgagatggcccaaggaggagggccagccaccgcattccgggtggatggagacagccccgagagccggctgaccgtgccgggcctcagcgagaacgtgccctacaagttcaaggtgcaggccaggaccactgagggcttcgggccagagcgcgagggcatcatcaccatagagtcccaggatggaggacccttcccgcagctgggcagccgtgccgggctcttccagcacccgctgcaaagcgagtacagcagcatcaccaccacccacaccagcgccaccgagcccttcctagtggatgggctgaccctgggggcccagcacctggaggcaggcggctccctcacccggcatgtgacccaggagtttgtgagccggacactgaccaccagcggaacccttagcacccacatggaccaacagttcttccaaacttgaccgcaccctgccccacccccgccacgtcccactaggcgtcctcccgactcctctcccggagcctcctcagctactccatccttgcacccctgggggcccagcccacccgcatgcacagagcaggggctaggtgtctcctgggaggcatgaagggggcaaggtccgtcctctgtgggcccaaacctatttgtaaccaaagagctgggagcagcacaaggacccagcctttgttctgcacttaataaatggttttgctactgcta

SEQ ID NO: 969 - DNA, 1130 bp, Homo sapiens
acccgggaaaccggaagccgcctcccacttggttgctcgtacgcggctagtgggtcctcagtggatgtaggctgggcgccgcgatgttcgacgggacaccggcggagagcgacctcggggttaaggggtggggctgacgtcaggagccaagatggcggcggtggtcgcactctccttgaggcgccggttgccggccacaacccttggcggagcctgcctgcaggcctcccgaggagcccagacagctgcagccacagctccccgtatcaagaaatttgccatctatcgatgggacccagacaaggctggagacaaacctcatatgcagacttatgaagttgaccttaataaatgtggccccatggtattggatgctttaatcaagattaagaatgaagttgactctactttgaccttccgaagatcatgcagagaaggcatctgtggctcttgtgcaatgaacatcaatggaggcaacactctagcttgcacccgaaggattgacaccaacctcaataaggtctcaaaaatctaccctcttccacacatgtatgtgataaaggatcttgttcccgatttgagcaacttctatgcacagtacaaatccattgagccttatttgaagaagaaggatgaatctcaggaaggcaagcagcagtatctgcagtccatagaagagcgtgagaaactggacgggctctacgagtgcattctctgtgcctgctgtagcaccagctgccccagctactggtggaacggagacaaatatctggggcctgcagttcttatgcaggcctatcgctggatgattgactccagagatgacttcacagaggagcgcctggccaagctgcaggacccattctctctataccgctgccacaccatcatgaactgcacaaggacctgtcctaagggtctgaatccagggaaagctattgcagagatcaagaaaatgatggcaacctataaggagaagaaagcttcagtttaactgtttccatgctaaacatgatttataaccagctcagagctgaacataatttatatctaatttgagttcctttaaagatcttggttttccatgaatacagcatgtataataaaaaaaaaaaaaaaaaaaaaaaaaa

SEQ ID NO: 970 - DNA, 1006 bp, Homo sapiens
ccaagatggcggcggtggtcgcactctccttgaggcgccggttgccggccacaacccttggcggagcctgcctgcctcccgaggagcccagacagctgcagccacagctccccgtatcaagaaatttgccatctatcgatgggacccagacaaggctggagacaaacctcatatgcagacttatgaagttgaccttaataaatgtggccccatggtattggatgctttaatcaagattaagaatgaagttgactctactttgaccttccgaagatcatgcagagaaggcatctgtggctcttgtgcaatgaacatcaatggaggcaacactctagcttgcacccgaaggattgacaccaacctcaataaggtctcaaaaatctaccctcttccacacatgtatgtgataaaggatcttgttcccgatttgagcaacttctatgcacagtacaaatccattgagccttatttgaagaagaaggatgaatctcaggaaggcaagcagcagtatctgcagtccatagaagagcgtgagaaactggacgggctctacgagtgcattctctgtgcctgctgtagcaccagctgccccagctactggtggaacggagacaaatatctggggcctgcagttcttatgcaggcctatcgctggatgattgactccagagatgacttcacagaggagcgcctggccaagctgcaggacccattctctctataccgctgccacaccatcatgaactgcacaaggacctgtcctaagggtctgaatccagggaaagctattgcagagatcaagaaaatgatggcaacctataaggagaagaaagcttcagtttaactgtttccatgctaaacatgatttataaccagctcagagctgaacataatttatatctaatttgagttcctttaaagatcttggttttccatgaatacagcatgtataataaaaattttaagaaataaatgttattctactttattaacaaaaaaaaaagaa

SEQ ID NO: 971 - DNA, 1157 bp, Homo sapiens
cacccgggaaaccggaagccgcctcccacttggttgctcgtacgcggctagtgggtcctcagtggatgtaggctgggcgccgcgatgttcgacgggacaccggcggagagcgacctcggggttaaggggtggggctgacgtcaggagccaagatggcggcggtggtcgcactctccttgaggcgccggttgccggccacaacccttggcggagcctgcctgcaggcctcccgaggagcccagacagctgcagccacagctccccgtatcaagaaatttgccatctatcgatgggacccagacaaggctggagacaaacctcatatgcagacttatgaagttgaccttaataaatgtggccccatggtattggatgctttaatcaagattaagaatgaagttgactctactttgaccttccgaagatcatgcagagaaggcatctgtggctcttgtgcaatgaacatcaatggaggcaacactctagcttgcacccgaaggattgacaccaacctcaataaggtctcaaaaatctaccctcttccacacatgtatgtgataaaggatcttgttcccgatttgagcaacttctatgcacagtacaaatccattgagccttatttgaagaagaaggatgaatctcaggaaggcaagcagcagtatctgcagtccatagaagagcgtgagaaactggacgggctctacgagtgcattctctgtgcctgctgtagcaccagctgccccagctactggtggaacggagacaaatatctggggcctgcagttcttatgcaggcctatcgctggatgattgactccagagatgacttcacagaggagcgcctggccaagctgcaggacccattctctctataccgctgccacaccatcatgaactgcacaaggacctgtcctaagggtctgaatccagggaaagctattgcagagatcaagaaaatgatggcaacctataaggagaagaaagcttcagtttaactgtttccatgctaaacatgatttataaccagctcagagctgaacataatttatatctaatttgagttcctttaaagatcttggttttccatgaatacagcatgtataataaaaattttaagaaataaatgttattctactttattaacaaaaaaaaaagaa

SEQ ID NO: 972 - DNA, 2306 bp, Homo sapiens
cccctcggaccaccggactggcctggggcgggacgtgggcgcgggggcgcggcgtgcggcacgctgcagggctgaagcggcggcggcggtggggactgcacgtagcccggcgctcggcatggctctcctggtgctcggtctggtgagctgtaccttctttctggcagtgaatggtctgtattcctctagtgatgatgtgatcgaattaactccatcgaatttcaaccgagaagttattcagagtgatagtttgtggcttgtagaattctatgctccatggtgtggtcactgtcaaagattaacaccagaatggaagaaagcagcaactgcattaaaagatgttgtcaaagttggtgcagttgatgcagataagcatcattccctaggaggtcagtatggtgttcagggatttcctaccattaagatttttggatccaacaaaaacagaccagaagattaccaaggtggcagaactggtgaagccattgtagatgctgcgctgagtgctctgcgccagctcgtgaaggatcgcctcgggggacggagcggaggatacagttctggaaaacaaggcagaagtgatagttcaagtaagaaggatgtgattgagctgacagacgacagctttgataagaatgttctggacagtgaagatgtttggatggttgagttctatgctccttggtgtggacactgcaaaaacctagagccagagtgggctgccgcagcttcagaagtaaaagagcagacgaaaggaaaagtgaaactggcagctgtggatgctacagtcaatcaggttctggcctcccgatacgggattagaggatttcctacaatcaagatatttcagaaaggcgagtctcctgtggattatgacggtgggcggacaagatccgacatcgtgtcccgggcccttgatttgttttctgataacgccccacctcctgagctgcttgagattatcaacgaggacattgccaagaggacgtgtgaggagcaccagctctgtgttgtggctgtgctgccccatatccttgatactggagctgcaggcagaaattcttatctggaagttcttctgaagttggcagacaaatacaaaaagaaaatgtgggggtggctgtggacagaagctggagcccagtctgaacttgagaccgcgttggggattggagggtttgggtaccccgccatggccgccatcaatgcacgcaagatgaaatttgctctgctaaaaggctccttcagtgagcaaggcatcaacgagtttctcagggagctctcttttgggcgtggctccacggcacctgtaggaggcggggctttccctaccatcgttgagagagagccttgggacggcagggatggcgagcttcccgtggaggatgacattgacctcagtgatgtggagcttgatgacttagggaaagatgagttgtgagagccacaacagaggcttcagaccattttcttttcttgggagccagtggatttttccagcagtgaagggacattctctacactcagatgactctaccagtggccttttaaccaagaagtagtacttgattggtcatttgaaaacactgcaacagtgaacttttgcatctcaagaaaacattgaaaaattctatgaattgttgtagccggtgaattgagtcgtattctgtcacataatattttgaagaaaacttggctgtcgaaacatttttctctctgactgctgcttgaatgttcttggaggctgtttcttatgtatgggttttttttaatgtgatcccttcatttgaatattaatggctttttccattaaagaataaaatattttggacaatgccgataaatgtatgaagttagtatccacatcataaattcagagtgatgtttagcagtaaatcaatattttgaagtgatacacagatgtctttcctccccacaaacttttttaaacaaaaaacaagacctcttttctttagatggtgccacctatgcccaccacaacagagattttacatggaaaccgggctcagtgagaactgatttcctgcccaatatttgtctttgggctgtctctagtgactaattattaaggaatctagctggttatacagttcaaggctttctatgttgttaatgaacctcaaaatagccgttaagacatgaaatacagcagcaggttaccaatgcgaacaggtagttcgcatttatgtaaaacattcagaaaatgaagttttgaatttgttggaacattcaaaggacttgagagcattttattgtaacttaaaaaaataaatacaactgtcact

SEQ ID NO: 973 - DNA, 2179 bp, Homo sapiens
gcacttttgtttttatcttcaggtctggtgagctgtaccttctttctggcagtgaatggtctgtattcctctagtgatgatgtgatcgaattaactccatcgaatttcaaccgagaagttattcagagtgatagtttgtggcttgtagaattctatgctccatggtgtggtcactgtcaaagattaacaccagaatggaagaaagcagcaactgcattaaaagatgttgtcaaagttggtgcagttgatgcagataagcatcattccctaggaggtcagtatggtgttcagggatttcctaccattaagatttttggatccaacaaaaacagaccagaagattaccaaggtggcagaactggtgaagccattgtagatgctgcgctgagtgctctgcgccagctcgtgaaggatcgcctcgggggacggagcggaggatacagttctggaaaacaaggcagaagtgatagttcaagtaagaaggatgtgattgagctgacagacgacagctttgataagaatgttctggacagtgaagatgtttggatggttgagttctatgctccttggtgtggacactgcaaaaacctagagccagagtgggctgccgcagcttcagaagtaaaagagcagacgaaaggaaaagtgaaactggcagctgtggatgctacagtcaatcaggttctggcctcccgatacgggattagaggatttcctacaatcaagatatttcagaaaggcgagtctcctgtggattatgacggtgggcggacaagatccgacatcgtgtcccgggcccttgatttgttttctgataacgccccacctcctgagctgcttgagattatcaacgaggacattgccaagaggacgtgtgaggagcaccagctctgtgttgtggctgtgctgccccatatccttgatactggagctgcaggcagaaattcttatctggaagttcttctgaagttggcagacaaatacaaaaagaaaatgtgggggtggctgtggacagaagctggagcccagtctgaacttgagaccgcgttggggattggagggtttgggtaccccgccatggccgccatcaatgcacgcaagatgaaatttgctctgctaaaaggctccttcagtgagcaaggcatcaacgagtttctcagggagctctcttttgggcgtggctccacggcacctgtaggaggcggggctttccctaccatcgttgagagagagccttgggacggcagggatggcgagcttcccgtggaggatgacattgacctcagtgatgtggagcttgatgacttagggaaagatgagttgtgagagccacaacagaggcttcagaccattttcttttcttgggagccagtggatttttccagcatctctacactcagatgactctaccagtggccttttaaccaagaagtagtacttgattggtcatttgaaaacactgcaacagtgaacttttgcatctcaagaaaacattgaaaaattctatgaattgttgtagccggtgaattgagtcgtattctgtcacataatattttgaagaaaacttggctgtcgaaacatttttctctctgactgctgcttgaatgttcttggaggctgtttcttatgtatgggttttttttaatgtgatcccttcatttgaatattaatggctttttccattaaagaataaaatattttggacaatgccgataaatgtatgaagttagtatccacatcataaattcagagtgatgtttagcagtaaatcaatattttgaagtgatacacagatgtctttcctccccacaaacttttttaaacaaaaaacaagacctcttttctttagatggtgccacctatgcccaccacaacagagattttacatggaaaccgggctcagtgagaactgatttcctgcccaatatttgtctttgggctgtctctagtgactaattattaaggaatctagctggttatacagttcaaggctttctatgttgttaatgaacctcaaaatagccgttaagacatgaaatacagcagcaggttaccaatgcgaacaggtagttcgcatttatgtaaaacattcagaaaatgaagttttgaatttgttggaacattcaaaggacttgagagcattttattgtaacttaaaaaaataaatacaactgtcact

SEQ ID NO: 974 - DNA, 2344 bp, Homo sapiens
ggcccgcccccgcgcggccgcccctcggaccaccggactggcctggggcgggacgtgggcgcgggggcgcggcgtgcggcacgctgcagggctgaagcggcggcggcggtggggactgcacgtagcccggcgctcggcatggctctcctggtgctcggtctggtgagctgtaccttctttctggcagtgaatggtctgtattcctctagtgatgatgtgatcgaattaactccatcgaatttcaaccgagaagttattcagagtgatagtttgtggcttgtagaattctatgctccatggtgtggtcactgtcaaagattaacaccagaatggaagaaagcagcaactgcattaaaagatgttgtcaaagttggtgcagttgatgcagataagcatcattccctaggaggtcagtatggtgttcagggatttcctaccattaagatttttggatccaacaaaaacagaccagaagattaccaaggtggcagaactggtgaagccattgtagatgctgcgctgagtgctctgcgccagctcgtgaaggatcgcctcgggggacggagcggaggatacagttctggaaaacaaggcagaagtgatagttcaagtaagaaggatgtgattgagctgacagacgacagctttgataagaatgttctggacagtgaagatgtttggatggttgagttctatgctccttggtgtggacactgcaaaaacctagagccagagtgggctgccgcagcttcagaagtaaaagagcagacgaaaggaaaagtgaaactggcagctgtggatgctacagtcaatcaggttctggcctcccgatacgggattagaggatttcctacaatcaagatatttcagaaaggcgagtctcctgtggattatgacggtgggcggacaagatccgacatcgtgtcccgggcccttgatttgttttctgataacgccccacctcctgagctgcttgagattatcaacgaggacattgccaagaggacgtgtgaggagcaccagctctgtgttgtggctgtgctgccccatatccttgatactggagctgcaggcagaaattcttatctggaagttcttctgaagttggcagacaaatacaaaaagaaaatgtgggggtggctgtggacagaagctggagcccagtctgaacttgagaccgcgttggggattggagggtttgggtaccccgccatggccgccatcaatgcacgcaagatgaaatttgctctgctaaaaggctccttcagtgagcaaggcatcaacgagtttctcagggagctctcttttgggcgtggctccacggcacctgtaggaggcggggctttccctaccatcgttgagagagagccttgggacggcagggatggcgagcttcccgtggaggatgacattgacctcagtgatgtggagcttgatgacttagggaaagatgagttgtgagagccacaacagaggcttcagaccattttcttttcttgggagccagtggatttttccagcagtgaagggacattctctacactcagatgactctaccagtggccttttaaccaagaagtagtacttgattggtcatttgaaaacactgcaacagtgaacttttgcatctcaagaaaacattgaaaaattctatgaattgttgtagccggtgaattgagtcgtattctgtcacataatattttgaagaaaacttggctgtcgaaacatttttctctctgactgctgcttgaatgttcttggaggctgtttcttatgtatgggttttttttaatgtgatcccttcatttgaatattaatggctttttccattaaagaataaaatattttggacaatgccgataaatgtatgaagttagtatccacatcataaattcagagtgatgtttagcagtaaatcaatattttgaagtgatacacagatgtctttcctccccacaaacttttttaaacaaaaaacaagacctcttttctttagatggtgccacctatgcccaccacaacagagattttacatggaaaccgggctcagtgagaactgatttcctgcccaatatttgtctttgggctgtctctagtgactaattattaaggaatctagctggttatacagttcaaggctttctatgttgttaatgaacctcaaaatagccgttaagacatgaaatacagcagcaggttaccaatgcgaacaggtagttcgcatttatgtaaaacattcagaaaatgaagttttgaatttgttggaacattcaaaggacttgagagcattttattgtaacttaaaaaaataaatacaactgtcactaaaaaaaaaaaaaaaaaa

SEQ ID NO: 975 - DNA, 1090 bp, Homo sapiens
gggggtttccgggaggcgcgtggggcttgaggccgagaacggcccttgctgccaccaacatggagactttgtaccgtgtcccgttcttagtgctcgaatgtcccaacctgaagctgaagaagccgccctggttgcacatgccgtcggccatgactgtgtatgctctggtggtggtgtcttacttcctcatcaccggaggaataatttatgatgttattgttgaacctccaagtgtcggttctatgactgatgaacatgggcatcagaggccagtagctttcttggcctacagagtaaatggacaatatattatggaaggacttgcatccagcttcctatttacaatgggaggtttaggtttcataatcctggaccgatcgaatgcaccaaatatcccaaaactcaatagattccttcttctgttcattggattcgtctgtgtcctattgagttttttcatggctagagtattcatgagaatgaaactgccgggctatctgatgggttagagtgcctctgagaagaaatcagtggatactggatttgctcctgtcaatgaagttttaaaggctgtaccaatcctctaatatgaaatgtggaaaagaatgaagagcagcagtaaaagaaatatctagtgaaaaaacaggaagcgtattgaagcttggactagaatttcttcttggtattaaagagacaagtttatcacagaattttttttcctgctggcctattgctataccaatgatgttgagtggcattttctttttagtttttcattaaaatatattccatatctacaactataatatcaaataaagtgattattttttacaaccctcttaacattttttggagatgacatttctgattttcagaaattaacataaaatccagaagcaagattccgtaagctgagaactctggacagttgatcagctttacctatggtgctttgcctttaactagagtgtgtgatggtagattatttcagatatgtatgtaaaactgtttcctgaacaataagatgtatgaacggagcagaaataaatactttttctaaaaaaaaaaaaaaaaaaaaaaaaaaaaaaaa

SEQ ID NO: 976 - DNA, 1000 bp, Homo sapiens
ggagggcgggcctgtttccgggaggcgcgtggggcttgaggccgagaacggcccttgctgccaccaacatggagactttgtaccgtgtcccgttcttagtgctcgaatgtcccaacctgaagctgaagaagccgccctggttgcacatgccgtcggccatgactgtgtatgctctggtggtggtgtcttacttcctcatcaccggaggaataatttatgatgttattgttgaacctccaagtgtcggttctatgactgatgaacatgggcatcagaggccagtagctttcttggcctacagagtaaatggacaatatattatggaaggacttgcatccagcttcctatttacaatgggaggtttaggtttcataatcctggaccgatcgaatgcaccaaatatcccaaaactcaatagattccttcttctgttcattggattcgtctgtgtcctattgagttttttcatggctagagtattcatgagaatgaaactgccgggctatctgatgggttagagtgcctttgagaagaaatcagtggatactggatttgctcctgtcaatgaagttttaaaggctgtaccaatcctctaatatgaaatgtggaaaagaatgaagagcagcagtaaaagaaatatctagtgaaaaaacaggaagcgtattgaagcttggactagaatttcttcttggtattaaagagacaagtttatcacagaattttttttcctgctggcctattgctataccaatgatgttgagtggcattttctttttagtttttcattaaaatatattccatatctacaactataatatcaaataaagtgattattttttacaaccctcttaacattttttggagatgacatttctgattttcagaaattaacataaaatccagaagcaagattccgtaagctgagaactctgggatatgtatgtaaaactgtttcctgaacaataagatgtatgaacggagcagaaataaatactttttc

SEQ ID NO: 977 - DNA, 1071 bp, Homo sapiens
ggagggcgggcctgtttccgggaggcgcgtggggcttgaggccgagaacggcccttgctgccaccaacatggagactttgtaccgtgtcccgttcttagtgctcgaatgtcccaacctgaagctgaagaagccgccctggttgcacatgccgtcggccatgactgtgtatgctctggtggtggtgtcttacttcctcatcaccggaggaataatttatgatgttattgttgaacctccaagtgtcggttctatgactgatgaacatgggcatcagaggccagtagctttcttggcctacagagtaaatggacaatatattatggaaggacttgcatccagcttcctatttacaatgggaggtttaggtttcataatcctggaccgatcgaatgcaccaaatatcccaaaactcaatagattccttcttctgttcattggattcgtctgtgtcctattgagttttttcatggctagagtattcatgagaatgaaactgccgggctatctgatgggttagagtgcctttgagaagaaatcagtggatactggatttgctcctgtcaatgaagttttaaaggctgtaccaatcctctaatatgaaatgtggaaaagaatgaagagcagcagtaaaagaaatatctagtgaaaaaacaggaagcgtattgaagcttggactagaatttcttcttggtattaaagagacaagtttatcacagaattttttttcctgctggcctattgctataccaatgatgttgagtggcattttctttttagtttttcattaaaatatattccatatctacaactataatatcaaataaagtgattattttttacaaccctcttaacattttttggagatgacatttctgattttcagaaattaacataaaatccagaagcaagattccgtaagctgagaactctggacagttgatcagctttacctatggtgctttgcctttaactagagtgtgtgatggtagattatttcagatatgtatgtaaaactgtttcctgaacaataagatgtatgaacggagcagaaataaatactttttctaatt

SEQ ID NO: 978 - DNA, 1566 bp, Homo sapiens
cccgcggccccgcccgcctccgcctccggctccccgcactctccgggtccacgcatcgtcctcccgcgcgcccgcccgcccatggccgggaaggtgcggtcactgctgccgccgctgctgctggccgccgcgggcctcgccggcctcctactgctgtgcgtccccacccgcgacgtccgggagccgcccgccctcaagtatggcatcgtcctggacgctggttcttcacacacgtccatgtttatctacaagtggccggcagacaaggagaacgacacaggcattgtgggccagcacagctcctgtgatgttccaggtgggggcatctccagctatgcagacaacccttctggggccagccagagtcttgttggatgcctcgaacaggcgcttcaggatgtgcccaaagagagacacgcgggcacacccctctacctgggagccacagcgggtatgcgcctgctcaacctgaccaatccagaggcctcgaccagtgtgctcatggcagtgactcacacactgacccagtacccctttgacttccggggtgcacgcatcctctcgggccaggaagagggggtgtttggctgggtgactgccaactacctgctggagaacttcatcaagtacggctgggtgggccggtggttccggccacggaaggggacactgggggccatggacctggggggtgcctctacccagatcacttttgagacaaccagtccagctgaggacagagccagcgaggtccagctgcatctctacggccagcactaccgagtctacacccacagcttcctctgctatggccgtgaccaggtcctccagaggctgctggccagcgccctccagacccacggcttccacccctgctggccgaggggcttttccacccaagtgctgctcggggatgtgtaccagtcaccatgcaccatggcccagcggccccagaacttcaacagcagtgccagggtcagcctgtcagggagcagtgacccccacctctgccgagatctggtttctgggctcttcagcttctcctcctgccccttctcccgatgctctttcaatggggtcttccagcccccagtggctgggaactttgtggccttctctgccttcttctacactgtggactttttgcggacttcgatggggctgcccgtggccaccctgcagcagctggaggcagccgcagtgaatgtctgcaaccagacctgggctcagctgcaagctcgggtgccagggcaacgggcccgcctggccgactactgcgccggggccatgttcgtgcagcagctgctgagtcgcggctacggcttcgatgagcgcgccttcggcggcgtgatcttccagaagaaggccgcggacactgcagtgggctgggcgctcggctacatgctgaacctgaccaacctgatccccgccgacccgccggggctgcgcaagggcacagacttcagctcctgggtcgtcctcctgctgctcttcgcctccgcgctcctggctgcgcttgtcctgctgctgcgtcaggtgcactccgccaagctgccaagcaccatt

SEQ ID NO: 979 - DNA, 1488 bp, Homo sapiens
atggccgggaaggtgcggtcactgctgccgccgctgctgctggccgccgcgggcctcgccggcctcctactgctgtgcgtccccacccgcgacgtccgggagccgcccgccctcaagtatggcatcgtcctggacgctggttcttcacacacgtccatgtttatctacaagtggccggcagacaaggagaacgacacaggcattgtgggccagcacagctcctgtgatgttccaggtgggggcatctccagctatgcagacaacccttctggggccagccagagtcttgttggatgcctcgaacaggcgcttcaggatgtgcccaaagagagacacgcgggcacacccctctacctgggagccacagcgggtatgcgcctgctcaacctgaccaatccagaggcctcgaccagtgtgctcatggcagtgactcacacactgacccagtacccctttgacttccggggtgcacgcatcctctcgggccaggaagagggggtgtttggctgggtgactgccaactacctgctggagaacttcatcaagtacggctgggtgggccggtggttccggccacggaaggggacactgggggccatggacctggggggtgcctctacccagatcacttttgagacaaccagtccagctgaggacagagccagcgaggtccagctgcatctctacggccagcactaccgagtctacacccacagcttcctctgctatggccgtgaccaggtcctccagaggctgctggccagcgccctccagacccacggcttccacccctgctggccgaggggcttttccacccaagtgctgctcggggatgtgtaccagtcaccatgcaccatggcccagcggccccagaacttcaacagcagtgccagggtcagcctgtcagggagcagtgacccccacctctgccgagatctggtttctgggctcttcagcttctcctcctgccccttctcccgatgctctttcaatggggtcttccagcccccagtggctgggaactttgtggccttctctgccttcttctacactgtggactttttgcggacttcgatggggctgcccgtggccaccctgcagcagctggaggcagccgcagtgaatgtctgcaaccagacctgggctcagctgcaagctcgggtgccagggcaacgggcccgcctggccgactactgcgccggggccatgttcgtgcagcagctgctgagtcgcggctacggcttcgacgagcgcgccttcggcggcgtgatcttccagaagaaggccgcggacactgcagtgggctgggcgctcggctacatgctgaacctgaccaacctgatccccgccgacccgccggggctgcgcaagggcacagacttcagctcctgggtcgtcctcctgctgctcttcgcctccgcgctcctggctgcgcttgtcctgctgctgcgtcaggtgcactccgccaagctgccaagcaccatttag

SEQ ID NO: 980 - DNA, 2056 bp, Homo sapiens
cccgcggccccgcccgcctccgcctccggctccccgcactctccgggtccacgcatcgtcctcccgcgcgcccgcccgcccatggccgggaaggtgcggtcactgctgccgccgctgctgctggccgccgcgggcctcgccggcctcctactgctgtgcgtccccacccgcgacgtccgggagccgcccgccctcaagtatggcatcgtcctggacgctggttcttcacacacgtccatgtttatctacaagtggccggcagacaaggagaacgacacaggcattgtgggccagcacagctcctgtgatgttccaggtgggggcatctccagctatgcagacaacccttctggggccagccagagtcttgttggatgcctcgaacaggcgcttcaggatgtgcccaaagagagacacgcgggcacacccctctacctgggagccacagcgggtatgcgcctgctcaacctgaccaatccagaggcctcgaccagtgtgctcatggcagtgactcacacactgacccagtacccctttgacttccggggtgcacgcatcctctcgggccaggaagagggggtgtttggctgggtgactgccaactacctgctggagaacttcatcaagtacggctgggtgggccggtggttccggccacggaaggggacactgggggccatggacctggggggtgcctctacccagatcacttttgagacaaccagtccagctgaggacagagccagcgaggtccagctgcatctctacggccagcactaccgagtctacacccacagcttcctctgctatggccgtgaccaggtcctccagaggctgctggccagcgccctccagacccacggcttccacccctgctggccgaggggcttttccacccaagtgctgctcggggatgtgtaccagtcaccatgcaccatggcccagcggccccagaacttcaacagcagtgccagggtcagcctgtcagggagcagtgacccccacctctgccgagatctggtttctgggctcttcagcttctcctcctgccccttctcccgatgctctttcaatggggtcttccagcccccagtggctgggaactttgtggccttctctgccttcttctacactgtggactttttgcggacttcgatggggctgcccgtggccaccctgcagcagctggaggcagccgcagtgaatgtctgcaaccagacctgggctcagcagctgctgagtcgcggctacggcttcgatgagcgcgccttcggcggcgtgatcttccagaagaaggccgcggacactgcagtgggctgggcgctcggctacatgctgaacctgaccaacctgatccccgccgacccgccggggctgcgcaagggcacagacttcagctcctgggtcgtcctcctgctgctcttcgcctccgcgctcctggctgcgcttgtcctgctgctgcgtcaggtgcactccgccaagctgccaagcaccatttaggggccgacgggggcagctgccccatccctcccccaacccctgtatccccaccccgtactcccacccctcccacaacccctgtacctcccacccctgtatccccacccctccacccacccctctcccaacctctctccccgcccctgtatcctgcattcctccacccaccctctatcccccaccgctccaccccaccactgtcttctccatccttccaccccaccctcagcgtctctgcccctaaggcagcccaggaaataggaactgagactctggtacccacaggagcctgggtgggcaaagagcgctcaatccagctccttgaacccctccagcccgcttcagcctgggcatcactgcaggccccgtgctcctcctcctcctcctcagggctgggtctccagagagtggggccttggtcctgagaatcagcccttagaggctccttctgtgtagtctgggtctgtactggggagggtcacagcccacgggctggcagccagcccagcacctacttgtaaaaattttgtaataaaaagtttttcctagagacgtg

SEQ ID NO: 981 - DNA, 1280 bp, Homo sapiens
ggccgggggctggccccaggtaacccctccgcgtatgggaccgagctgggccaggtctcctggccgggccggggataccgtggggtatgcccagtgatgccagcagcttgtggcacctgggcgcaccctccagctcgggccccttccgatgggtctgctggctcaggtgcgggcgatggccggggagccgcgccccgcacgtgactcagcactttccccagagcccggactgcggagaacaatatcctcctccctaacagataaacagcccttgttcctcgggataaggactggcagtcccctgacaccctaagaccggcatctgtcgatgttatttccccagcatggccgaaacagaagccctgtcgaagcttcgggaagacttcaggatgcagaataaatccgtctttattttgggcgccagcggagaaaccggcagagtgctcttaaaggaaatcctggagcagggcctgttttccaaagtcacgctcattggccggaggaagctcaccttcgacgaggaagcttataaaaatgtgaatcaagaagtggtggactttgaaaagttggatgactacgcctctgcctttcaaggtcatgatgttggattctgttgcctgggtaccaccagagggaaagctggggcggagggatttgttcgtgttgaccgagattatgtgctgaagtctgcagagctggcaaaagctggagggtgcaaacatttcaacttgctatcctctaaaggagctgataaatcaagcaattttttatatctacaagttaagggagaagtagaagccaaggttgaagaattaaaatttgatcgttactctgtatttaggcctggagttctgttatgtgataggcaagaatctcgcccaggtgaatggctggttagaaagttctttggctccttaccagactcttgggccagggggcattctgtgcctgtggtgaccgtggttagagcaatgctgaacaatgtggtgagaccaagagacaagcagatggaactgctggagaacaaggccatccatgacctggggaaagcgcatggctctctcaagccatgaccacactggagaaatggtttttattgtcaaccttaacacccatcaccaaatcggtaatttcagggtctaaaaaaagtcagcatgttttaactttgttgttttactatcctcaggcatccattccaatcaagaaatgatggagctttggaaaaataaagatttgtcagccctatctcaaacttgaatcaaaatttctggggtgtgggc

SEQ ID NO: 982 - DNA, 1740 bp, Homo sapiens
ggccgggggctggccccaggtaacccctccgcgtatgggaccgagctgggccaggtctcctggccgggccggggataccgtggggtatgcccagtgatgccagcagcttgtggcacctgggcgcaccctccagctcgggccccttccgatgggtctgctggctcaggtgcgggcgatggccggggagccgcgccccgcacgtgactcagcactttccccagagcccggactgcggagaacaatatcctcctccctaacagataaacagcccttgttcctcgggataaggactggcagtcccctgacaccctaagaccggcatctgtcgatgttatttccccagcatggccgaaacagaagccctgtcgaagcttcgggaagacttcaggatgcagaataaatccgtctttattttgggcgccagcggagaaaccggcagagtgctcttaaaggaaatcctggagcagggcctgttttccaaagtcacgctcattggccggaggaagctcaccttcgacgaggaagcttataaaaatgtgaatcaagaagtggtggactttgaaaagttggatgactacgcctctgcctttcaaggtcatgatgttggattctgttgcctgggtaccaccagagggaaagctggggcggagggatttgttcgtgttgaccgagattatgtgctgaagtctgcagagctggcaaaagctggagggtgcaaacatttcaacttgctatcctctaaaggagctgataaatcaagcaattttttatatctacaagttaagggagaagtagaagccaaggttgaagaattaaaatttgatcgttactctgtatttaggcctggagttctgttatgtgataggcaagaatctcgcccaggtgaatggctggttagaaagttctttggctccttaccagactcttgggccagggggcattctgtgcctgtggtgaccgtggttagagcaatgctgaacaatgtggtgagaccaagagacaagcagatggaactgctggagaacaaggccatccatgacctggggaaagcgcatggctctctcaagccatgaccacactggagaaatggtttttattgtcaaccttaacacccatcaccaaatcggtaatttcagggtctaaaaaaagtcagcatgttttaactttgttgttttactatcctcaggcatccattccaatcaagaaatgatggtgctctgcatcagtggttcagagcctggttatacatatagatcactcagggagctttggaaaaataaagatttgtcagccctatctcaaacttgaatcaaaatttctggggtgtgggcacaataatctgtaattttctttgtttatacttcccctgatgccactggttccgatgccactggctggggggcctgctttgaaatgcttgtctgcagagtcacagcagccatgaaaaccttatgaccgtgcaaatgagctctgctctaaaattgttgacattcatgtctctgagttacaaaagtgctaattcactacatgtaattgtgtaagtaaacattgtgcctttactacttctttatgtaatagaagttatatacctaagcttatataatacatggggaggattaaataaaggaataaagatgaatggacaactcctgggtgcctcttagattgcttgaaaatgcccatgtagtgtgatatgcagcatttcagcctatggggtgatataatagcagctaatattta

SEQ ID NO: 983 - DNA, 1535 bp, Homo sapiens
acccccccggtccgaccagggaaggtgggatgctctgatggccgggcctgcggcgctgagcgcggcggcggcggctgctctggcggccgccctgctcctgctgcgtcgtgaggacccggggccgggggctggccccagcatggccgaaacagaagccctgtcgaagcttcgggaagacttcaggatgcagaataaatccgtctttattttgggcgccagcggagaaaccggcagagtgctcttaaaggaaatcctggagcagggcctgttttccaaagtcacgctcattggccggaggaagctcaccttcgacgaggaagcttataaaaatgtgaatcaagaagtggtggactttgaaaagttggatgactacgcctctgcctttcaaggtcatgatgttggattctgttgcctgggtaccaccagagggaaagctggggcggagggatttgttcgtgttgaccgagattatgtgctgaagtctgcagagctggcaaaagctggagggtgcaaacatttcaacttgctatcctctaaaggagctgataaatcaagcaattttttatatctacaagttaagggagaagtagaagccaaggttgaagaattaaaatttgatcgttactctgtatttaggcctggagttctgttatgtgataggcaagaatctcgcccaggtgaatggctggttagaaagttctttggctccttaccagactcttgggccagggggcattctgtgcctgtggtgaccgtggttagagcaatgctgaacaatgtggtgagaccaagagacaagcagatggaactgctggagaacaaggccatccatgacctggggaaagcgcatggctctctcaagccatgaccacactggagaaatggtttttattgtcaaccttaacacccatcaccaaatcggtaatttcagggtctaaaaaaagtcagcatgttttaactttgttgttttactatcctcaggcatccattccaatcaagaaatgatggtgctctgcatcagtggttcagagcctggttatacatatagatcactcagggagctttggaaaaataaagatttgtcagccctatctcaaacttgaatcaaaatttctggggtgtgggcacaataatctgtaattttctttgtttatacttcccctgatgccactggttccgatgccactggctggggggcctgctttgaaatgcttgtctgcagagtcacagcagccatgaaaaccttatgaccgtgcaaatgagctctgctctaaaattgttgacattcatgtctctgagttacaaaagtgctaattcactacatgtaattgtgtaagtaaacattgtgcctttactacttctttatgtaatagaagttatatacctaagcttatataatacatggggaggattaaataaaggaataaagatgaatggacaactcctgggtgcctcttagattgcttgaaaatgcccatgtagtgtgatatgcagcatttcagcctatggggtgatataatagcagctaatattta

SEQ ID NO: 984 - DNA, 1438 bp, Homo sapiens
ggatgctctgatggccgggcctgcggcgctgagcgcggcggcggcggctgctctggcggccgccctgctcctgctgcgtcgtgaggacccggggccgggggctggccccagcatggccgaaacagaagccctgtcgaagcttcgggaagacttcaggatgcagaataaatccgtctttattttgggcgccagcggagaaaccggcagagtgctcttaaaggaaatcctggagcagggcctgttttccaaagtcacgctcattggccggaggaagctcaccttcgacgaggaagcttataaaaatgtgaatcaagaagtggtggactttgaaaagttggatgactacgcctctgcctttcaaggtcatgatgttggattctgttgcctgggtaccaccagagggaaagctggggcggagggatttgttcgtgttgaccgagattatgtgctgaagtctgcagagctggcaaaagctggagggtgcaaacatttcaacttgctatcctctaaaggagctgataaatcaagcaattttttatatctacaagttaagggagaagtagaagccaaggttgaagaattaaaatttgatcgttactctgtatttaggcctggagttctgttatgtgataggcaagaatctcgcccaggtgaatggctggttagaaagttctttggctccttaccagactcttgggccagggggcattctgtgcctgtggtgaccgtggttagagcaatgctgaacaatgtggtgagaccaagagacaagcagatggaactgctggagaacaaggccatccatgacctggggaaagcgcatggctctctcaagccatgaccacactggagaaatggtttttattgtcaaccttaacacccatcaccaaatcggtaatttcagggtctaaaaaaagtcagcatgttttaactttgttgttttactatcctcaggcatccattccaatcaagaaatgatggtgctctgcatcagtggttcagagcctggttatacatatagatcactcagggagctttggaaaaataaagatttgtcagccctatctcaaacttgaatcaaaatttctggggtgtgggcacaataatctgtaattttctttgtttatacttcccctgatgccactggttccgatgccactggctggggggcctgctttgaaatgcttgtctgcagagtcacagcagccatgaaaaccttatgaccgtgcaaatgagctctgctctaaaattgttgacattcatgtctctgagttacaaaagtgctaattcactacatgtaattgtgtaagtaaacattgtgcctttactacttctttatgtaatagaagttatatacctaagcttatataatacatggggaggattaaataaaggaataaagatgaatggacaactccaaaaaaaaaaaaaaaaaaaa

SEQ ID NO: 985 - DNA, 1152 bp, Homo sapiens
aggcggcggccccctagcgtcgcgcagggtcggggactgcgcggcggtgccaggccgggcgtgggcgagagcacgaacgggctgcctgcgggctgagagcgtcgagctgtcaccatgggtgatcacgcttggagcttcctaaaggacttcctggccgggggcgtcgccgctgccgtctccaagaccgcggtcgcccccatcgagagggtcaaactgctgctgcaggtccagcatgccagcaaacagatcagtgctgagaagcagtacaaagggatcattgattgtgtggtgagaatccctaaggagcagggcttcctctccttctggaggggtaacctggccaacgtgatccgttacttccccacccaagctctcaacttcgccttcaaggacaagtacaagcagctcttcttagggggtgtggatcggcataagcagttctggcgctactttgctggtaacctggcgtccggtggggccgctggggccacctccctttgctttgtctacccgctggactttgctaggaccaggttggctgctgatgtgggcaagggcgccgcccagcgtgagttccatggtctgggcgactgtatcatcaagatcttcaagtctgatggcctgagggggctctaccagggtttcaacgtctctgtccaaggcatcattatctatagagctgcctacttcggagtctatgatactgccaaggggatgctgcctgaccccaagaacgtgcacatttttgtgagctggatgattgcccagagtgtgacggcagtcgcagggctggtgtcctacccctttgacactgttcgtcgtagaatgatgatgcagtccggccggaaaggggccgatattatgtacacggggacagttgactgctggaggaagattgcaaaagacgaaggagccaaggccttcttcaaaggtgcctggtccaatgtgctgagaggcatgggcggtgcttttgtattggtgttgtatgatgagatcaaaaaatatgtctaatgtaattaaaacacaagtattttgtatttattttacatttaaattcccacagcaaatagaaaataatttatcatacttgtacaattaactgaagaattgataataactgaatgtgaaacatcaataaagaccacttaatgc

SEQ ID NO: 986 - DNA, 1324 bp, Homo sapiens
aggcggcggccccctagcgtcgcgcagggtcggggactgcgcggcggtgccaggccgggcgtgggcgagagcacgaacgggctgcctgcgggctgagagcgtcgagctgtcaccatgggtgatcacgcttggagcttcctaaaggacttcctggccgggggcgtcgccgctgccgtctccaagaccgcggtcgcccccatcgagagggtcaaactgctgctgcaggtccagcatgccagcaaacagatcagtgctgagaagcagtacaaagggatcattgattgtgtggtgagaatccctaaggagcagggcttcctctccttctggaggggtaacctggccaacgtgatccgttacttccccacccaagctctcaacttcgccttcaaggacaagtacaagcagctcttcttagggggtgtggatcggcataagcagttctggcgctactttgctggtaacctggcgtccggtggggccgctggggccacctccctttgctttgtctacccgctggactttgctaggaccaggttggctgctgatgtgggcaagggcgccgcccagcgtgagttccatggtctgggcgactgtatcatcaagatcttcaagtctgatggcctgagggggctctaccagggtttcaacgtctctgtccaaggcatcattatctatagagctgcctacttcggagtctatgatactgccaaggggatgctgcctgaccccaagaacgtgcacatttttgtgagctggatgattgcccagagtgtgacggcagtcgcagggctggtgtcctacccctttgacactgttcgtcgtagaatgatgatgcagtccggccggaaaggggccgatattatgtacacggggacagttgactgctggaggaagattgcaaaagacgaaggagccaaggccttcttcaaaggtgcctggtccaatgtgctgagaggcatgggcggtgcttttgtattggtgttgtatgatgagatcaaaaaatatgtctaatgtaattaaaacacaagttcacagatttacagtgaacttgatctacaagttcacagatccattgtgtggtttaatagactattcctaggggaagtaaaaagatctgggataaaaccagactgaaaggaatacctcagaagagatgcttcattgagtgttcattaaaccacacatgtattttgtatttattttacatttaaattcccacagcaaatagaaaataatttatcatacttgtacaattaactgaagaattgataataactgaatgtgaaacatcaataaagaccacttaatgcacgctttctatttt

SEQ ID NO: 987 - DNA, 1320 bp, Homo sapiens
ccccctagcgtcgcgcagggtcggggactgcgcgcggtgccaggccgggcgtgggcgagagcacgaacgggctgctgcgggctgagagcgtcgagctgtcaccatgggtgatcacgcttggagcttcctaaaggacttcctggccggggcggtcgccgctgccgtctccaagaccgcggtcgcccccatcgagagggtcaaactgctgctgcaggtccagcatgccagcaaacagatcagtgctgagaagcagtacaaagggatcattgattgtgtggtgagaatccctaaggagcagggcttcctctccttctggaggggtaacctggccaacgtgatccgttacttccccacccaagctctcaacttcgccttcaaggacaagtacaagcagctcttcttagggggtgtggatcggcataagcagttctggcgctactttgctggtaacctggcgtccggtggggccgctggggccacctccctttgctttgtctacccgctggactttgctaggaccaggttggctgctgatgtgggcaggcgcgcccagcgtgagttccatggtctgggcgactgtatcatcaagatcttcaagtctgatggcctgagggggctctaccagggtttcaacgtctctgtccaaggcatcattatctatagagctgcctacttcggagtctatgatactgccaaggggatgctgcctgaccccaagaacgtgcacatttttgtgagctggatgattgcccagagtgtgacggcagtcgcagggctgctgtcctacccctttgacactgttcgtcgtagaatgatgatgcagtccggccggaaaggggccgatattatgtacacggggacagttgactgctggaggaagattgcaaaagacgaaggagccaaggccttcttcaaaggtgcctggtccaatgtgctgagaggcatgggcggtgcttttgtattggtgttgtatgatgagatcaaaaaatatgtctaatgtaattaaaacacaagttcacagatttacatgaacttgatctacaagttcacagatccattgtgtggtttaatagactattcctaggggaagtaaaaagatctgggataaaaccagactgaaaggaatacctcagaagagatgcttcattgagtgttcattaaaccacacatgtattttgtatttattttacatttaaattcccacagcaaatagaaataatttatcatacttgtacaattaactgaagaattgataataactgaatgtgaaacatcaataaagaccacttaatgcacaaaaaaaaaaaaaaaaaaaaaaaa

SEQ ID NO: 988 - DNA, 1319 bp, Homo sapiens
gcgtcgcgcagggtcggggactgcgcggcggtgccaggccgggcgtgggcgagagcacgaacgggctgcctgcgggctgagagcgtcgagctgtcaccatgggtgatcacgcttggagcttcctaaaggacttcctggccgggggcgtcgccgctgccgtctccaagaccgcggtcgcccccatcgagagggtcaaactgctgctgcaggtccagcatgccagcaaacagatcagtgctgagaagcagtacaaagggatcattgattgtgtggtgagaatccctaaggagcagggcttcctctccttctggaggggtaacctggccaacgtgatccgttacttccccacccaagctctcaacttcgccttcaaggacaagtacaagcagctcttcttagggggtgtggatcggcataagcagttctggcgctactttgctggtaacctggcgtccggtggggccgctggggccacctccctttgctttgtctacccgctggactttgctaggaccaggttggctgctgatgtgggcaagggcgccgcccagcgtgagttccatggtctgggcgactgtatcatcaagatcttcaagtctgatggcctgagggggctctaccagggtttcaacgtctctgtccaaggcatcattatctatagagctgcctacttcggagtctatgatactgccaaggggatgctgcctgaccccaagaacgtgcacatttttgtgagctggatgattgcccagagtgtgacggcagtcgcagggctggtgtcctacccctttgacactgttcgtcgtagaatgatgatgcagtccggccggaaaggggccgatattatgtacacggggacagttgactgctggaggaagattgcaaaagacgaaggagccaaggccttcttcaaaggtgcctggtccaatgtgctgagaggcatgggcggtgcttttgtattggtgttgtatgatgagatcaaaaaatatgtctaatgtaattaaaacacaagttcacagatttacagtgaacttgatctacaagttcacagatccattgtgtggtttaatagactattcctaggggaagtaaaaagatctgggataaaaccagactgaaaggaatacctcagaagagatgcttcattgagtgttcattaaaccacacatgtattttgtatttattttacatttaaattcccacagcaaatagaaaataatttatcatacttgtacaattaactgaagaattgataataactgaatgtgaaacatcaataaagaccacttaatgcacgctttctaaaaaaaaaaaaaaaa

SEQ ID NO: 989 - DNA, 2967 bp, Homo sapiens
aaaatactttctgagagtcctggacctcctgtgcaagaacatgaaacacctgtggttcttcctcctgctggtggcagctcccagatgggtcctgtcccaggtgcagctgcaggagtcgggcccaggactggtgaagccttcacagaccctgtccctcacctgcactgtctctggtgactccatcagcagtggtgcttactactggagctgggtccgccagtacccagggaagagcctggagtatattgggtacatctcttacagtgggaacacccactaccacccgtccctcaagagtcgacttaccatgtcagtcgacacatctaacaaccagttctccctgaagttgacgtctgtgactgccgctgacacggccgtatattattgtgcgagatctttgactatgtttgggggagttgtcgctgtaccctccttctttgactactggggccagggaaccctggtcaccgtctcctcagcctccaccaagggcccatcggtcttccccctggcgccctgctccaggagcacctccgagagcacagcggccctgggctgcctggtcaaggactacttccccgaaccggtgacggtgtcgtggaactcaggcgctctgaccagcggcgtgcacaccttcccggctgtcctacagtcctcaggactctactccctcagcagcgtggtgaccgtgacctccagcaacttcggcacccagacctacacctgcaacgtagatcacaagcccagcaacaccaaggtggacaagacagttgagcgcaaatgttgtgtcgagtgcccaccgtgcccagcaccacctgtggcaggaccgtcagtcttcctcttccccccaaaacccaaggacaccctcatgatctcccggacccctgaggtcacgtgcgtggtggtggacgtgagccacgaagaccccgaggtccagttcaactggtacgtggacggcatggaggtgcataatgccaagacaaagccacgggaggagcagttcaacagcacgttccgtgtggtcagcgtcctcaccgtcgtgcaccaggactggctgaacggcaaggagtacaagtgcaaggtctccaacaaaggcctcccagcccccatcgagaaaaccatctccaaaaccaaagggcagccccgagaaccacaggtgtacaccctgcccccatcccgggaggagatgaccaagaaccaggtcagcctgacctgcctggtcaaaggcttctaccccagcgacatcgccgtggagtgggagagcaatgggcagccggagaacaactacaagaccacacctcccatgctggactccgacggctccttcttcctctacagcaagctcaccgtggacaagagcaggtggcagcaggggaacgtcttctcatgctccgtgatgcatgaggctctgcacaaccactacacacagaagagcctctccctgtctccggagctgcaactggaggagagctgtgcggaggcgcaggacggggagctggacgggctgtggaccaccatcaccatcttcatcacactcttcctgctaagcgtgtgctacagtgccaccatcaccttcttcaaggtgaagtggatcttctcctcagtggtggacctgaagcagaccatcgtccccgactacagaaacatgatcaggcagggggcctagggccaccctctgtggggtgtccagggccgcccagaccccacacaggagccgtgggccatgctcagccatcacccaggccacacctgcccccgacctcaccgccctcaaccccatggctctctggcctcgcagtcgccctctgaccctgacacgccccccttccagaccctgtgcatagcaggtctaccccagacctccgctgcttggtgcatgcagggcgctgggggccaggtgtcccctcagcaggacgtccctgccctccggcccgccaggtgctcacacaaaaggaggtagtgaccagcatcccaggcccccactcaggcaggacctcgccctggagccaaccctgtccacgccagcctcctgaacacaggcgtggtttccagatgcccgcagccagccagcctccattccaggcactcccgtgaactcctgacatgaggaatgaggttgttctgatttcaagcaaagaacgctgctctctggctcctgggaacagtctcagtgccagcaccaccccttggctgcctgcccacactgctggattctcgggtggaactcgacccgcagggacagccagccccagagtccgcactggggagagaaggggccaggcccaggacactgccacctaccacccactcgagtccaccgagatcactcggagaagagcctgggccatgtggccgctgcaggagccccacggtgcaagggtgaggatagcccaaggaagggctgggcatctgcccagacaggcctcccacagaaggctggtgaccaggtcccaggcgggcaagactcagccttggtggggcctgaggacagaggaggcccaggagcatcggggagagaggtggagggacaccgggagagccaggagcgtggacacagccagaactcatcacagaggctggcgtccagccccgggtcacgtgcagcaggaacaagcagccactctgggggcaccaggtggagaggcaagacgacaaagagggtgcccgtgttcttgtgaaagcggggctgctggccacgagtgctggacagaggcccccacactctgctgcccccatcacgccgttccgtgactgtcacgcagaatccgcagacaggaagggagactcgagcgggagtgcggccagcgcctgcctcagctgtcagggaggactcccgggctcactcgaaggaggtgccaccatttcagctttggtagcttttcttcttcttttaaattttctaaagctcattaattgtctttgatgtttcttttgtgatgacaataaaatatcctttttaagtcttgt

SEQ ID NO: 990 - DNA, 1267 bp, Homo sapiens
cttccaccaagggcccatcggtcttccccctggcgccctgctccaggagcacctctgggggcacagcggccctgggctgcctggtcaaggactacttccccgaaccggtgacggtgtcgtggaactcaggcgccctgaccagcggcgtgcacaccttcccggctgtcctacagtcctcaggactctactccctcagcagcgtggtgaccgtgccctccagcagcttgggcacccagacctacacctgcaacgtgaatcacaagcccagcaacaccaaggtggacaagagagttgagctcaaaaccccacttggtgacacaactcacacatgcccacggtgcccagagcccaaatcttgtgacacacctcccccgtgcccacggtgcccagagcccaaatcttgtgacacacctcccccatgcccacggtgcccagagcccaaatcttgtgacacacctcccccatgcccacggtgcccagcacctgaactcctgggaggaccgtcagtcttcctcttccccccaaaacccaaggatacccttatgatttcccggacccctgaggtcacgtgcgtggtggtggacgtgagccacgaagaccccgaggtccagttcaagtggtacgtggacggcgtggaggtgcataatgccaagacaaagccgcgggaggagcagttcaacagcacgttccgtgtggtcagcgtcctcaccgtcctgcaccaggactggctgaacggcaaggagtacaagtgcaaggtctccaacaaagccctcccagcccccatcgagaaaaccatctccaaaaccaaaggacagccccgagaaccacaggtgtacaccctgcccccatcccgggaggagatgaccaagaaccaggtcagcctgacctgcctggtcaaaggcttctaccccagcgacatcgccgtggagtgggagagcagcgggcagccggagaacaactacaacaccacgcctcccatgctggactccgacggctccttcttcctctacagcaagctcaccgtggacaagagcaggtggcagcaggggaacatcttctcatgctccgtgatgcatgaggctctgcacaaccgcttcacgcagaagagcctctccctgtctccgggtaaatgagtgcgacggccggcaagcccccgctccccgggctctcggggtcgcgcgaggatgcttggcacgtaccccgtgtacatacttcccgggcacccagcatggaaataaagcacccagcgctgccctgggcccctgcg

SEQ ID NO: 991 - DNA, 1235 bp, Homo sapiens
tattgagaggctgagaccacgggcagaatggtcataatcactgccagtatcagtccagccccagggactcagagacagagaaaagagcagtgaacaaggtccgggctccccaccttctcccacgacctccaccaagggcccatcggtcttccccctggcgccctgctccaggagcacctccgagagcacagcggccctgggctgcctggtcaaggactacttccccgaaccggtgacggtgtcgtggaactcaggcgctctgaccagcggcgtgcacaccttcccggctgtcctacagtcctcaggactctactccctcagcagcgtggtgaccgtgacctccagcaacttcggcacccagacctacacctgcaacgtagatcacaagcccagcaacaccaaggtggacaagacagttgagcgcaaatgttgtgtcgagtgcccaccgtgcccagcaccacctgtggcaggaccgtcagtcttcctcttccccccaaaacccaaggacaccctcatgatctcccggacccctgaggtcacgtgcgtggtggtggacgtgagccacgaagaccccgaggtccagttcaactggtacgtggacggcatggaggtgcataatgccaagacaaagccacgggaggagcagttcaacagcacgttccgtgtggtcagcgtcctcaccgtcgtgcaccaggactggctgaacggcaaggagtacaagtgcaaggtctccaacaaaggcctcccagcccccatcgagaaaaccatctccaaaaccaaagggcagccccgagaaccacaggtgtacaccctgcccccatcccgggaggagatgaccaagaaccaggtcagcctgacctgcctggtcaaaggcttctaccccagcgacatcgccgtggagtgggagagcaatgggcagccggagaacaactacaagaccacacctcccatgctggactccgacggctccttcttcctctacagcaagctcaccgtggacaagagcaggtggcagcaggggaacgtcttctcatgctccgtgatgcatgaggctctgcacaaccactacacgcagaagagcctctccctgtctccgggtaaatgagtgccacggccggcaagcccccgctccccaggctctcggggtcgcgtgaggatgcttggcacgtaccccgtgtacatacttcccaggcacccagcatgggaaataaagcacccagcgctgccctgggccc

SEQ ID NO: 992 - DNA, 2617 bp, Homo sapiens
cctccaccaagggcccatcggtcttccccctggcaccctcctccaagagcacctctgggggcacagcagccctgggctgcctggtcaaggactacttccccgaaccggtgacggtgtcgtggaactcaggcgccctgaccagcggcgtgcacaccttcccggctgtcctacagtcctcaggactctactccctcagcagcgtggtgaccgtgccctccagcagcttgggcacccagacctacatctgcaacgtgaatcacaagcccagcaacaccaaggtggacaagagagttgagcccaaatcttgtgacaaaactcacacatgcccaccgtgcccagcacctgaactcctggggggaccgtcagtcttcctcttccccccaaaacccaaggacaccctcatgatctcccggacccctgaggtcacatgcgtggtggtggacgtgagccacgaagaccctgaggtcaagttcaactggtacgtggacggcgtggaggtgcataatgccaagacaaagccgcgggaggagcagtacaacagcacgtaccgtgtggtcagcgtcctcaccgtcctgcaccaggactggctgaatggcaaggagtacaagtgcaaggtctccaacaaagccctcccagcccccatcgagaaaaccatctccaaagccaaagggcagccccgagaaccacaggtgtacaccctgcccccatcccgggaggagatgaccaagaaccaggtcagcctgacctgcctggtcaaaggcttctatcccagcgacatcgccgtggagtgggagagcaatgggcagccggagaacaactacaagaccacgcctcccgtgctggactccgacggctccttcttcctctatagcaagctcaccgtggacaagagcaggtggcagcaggggaacgtcttctcatgctccgtgatgcatgaggctctgcacaaccactacacgcagaagagcctctccctgtctccggagctgcaactggaggagagctgtgcggaggcgcaggacggggagctggacgggctgtggacgaccatcaccatcttcatcacactcttcctgttaagcgtgtgctacagtgccaccgtcaccttcttcaaggtgaagtggatcttctcctcggtggtggacctgaagcagaccatcatccccgactacaggaacatgatcggacagggggcctagggccaccctctgcggggtgtccagggccgcccagaccccacacaccagccatgggccatgctcagccaccacccaggccacacctgcccccgacctcaccgccctcaaccccatggctctctggcctcgcagttgccctctgaccctgacacacctgacacgccccccttccagaccctgtgcatagcaggtctaccccagacctccgctgcttggtgcatgcagggcactgggggccaggtgtcccctcagcaggacgtccttgccctccggaccacaaggtgctcacacaaaaggaggcagtgaccggtatcccaggcccccacccaggcaggagctggccctggagccaaccccgtccacgccagcctcctgaacacaggcgtggtttccagatggtgagtgggagcatcagccgccaaggtagggaagccacagcaccatcaggccctgttggggaggcttccgagagctgcgaaggctcactcagacggccttcctcccagcccgcagccagccagcctccattccgggcactcccgtgaactcctgacatgaggaatgacgttgttctgatttcaagcaaagaacgctgctctctggctcctgggaacagtctcggtgccagcaccaccccttggctgcctgcccacactgctggattctcgggtggaactggacccgcagggacagccagccccagagtccgcactggggagagaaggggccaggcccaggacactgccacctcccacccactccagtccaccgagatcactcagagaagagcctgggccatgtggccgctgcaggagccccacagtgcaagggtgaggatagcccaaggaagggctgggcatctgcccagacaggcctcccagagaaggctggtgaccaggtcccaggcgggcaagactcagccttggtggggcctgaggacagaggaggcccaggagcatcggggagagaggtggagggacaccgggagagccaggagcgtggacacagccagaactcatcacagaggctggcgtccagccccgggtcacgtgcagcaggaacaagcagccactctgggggcaccaggtggagaggcaagacgacaaagagggtgcccgtgttcttgcgaaagcagggctgctggccacgagtgctggacagaggcccccacgctctgctgcccccatcacgccgttccgtgactgtcacgcagaatctgcagacaggaagggagactcgagcgggagtgcggccagcgcctgcctcggccgtcagggaggactcctgggctcactcgaaggaggtgccaccatttcagctttggtagcttttcttcttcttttaaattttctaaagctcattaattgtctttgatgtttcttttgtgatgacaataaaatatcctttttaagtcttgt

SEQ ID NO: 993 - DNA, 855 bp, Homo sapiens
gtgcgttcttctacacatgcgcagggttgggcgggtcttcttccttctcgcctaacgctgccaacatggtgttcaggcgcttcgtggaggttggccgggtggcctatgtctcctttggacctcatgccggaaaattggtcgcgattgtagatgttattgatcagaacagggctttggtcgatggaccttgcactcaagtgaggagacaggccatgcctttcaagtgcatgcagctcactgatttcatcctcaagtttccgcacagtgcccaccagaagtatgtccgacaagcctggcagaaggcagacatcaatacaaaatgggcagccacacgatgggccaagaagattgaagccagagaaaggaaagccaagatgacagattttgatcgttttaaagttatgaaggcaaagaaaatgaggaacagaataatcaagaatgaagttaagaagcttcaaaaggcagctctcctgaaagcttctcccaaaaaagcacctggtactaagggtactgctgctgctgctgctgctgctgctgctgctgctgctaaagttccagcaaaaaagatcaccgccgcgagtaaaaaggctccagcccagaaggttcctgcccagaaagccacaggccagaaagcagcgcctgctccaaaagctcagaagggtcaaaaagctccagcccagaaagcacctgctccaaaggcatctggcaagaaagcataagtggcaatcataaaaagtaataaaggttctttttgacctgttgacaaatgtatttaagcctttggatttaaagcctgttgaggctggagttaggaggcagattgatagtaggattataataaacattaaataatca

SEQ ID NO: 994 - DNA, 707 bp, Homo sapiens
cacctaacgccaccaacatggtgttcaggcgcttcgtggaggttggccgggtggcctatgtctcctttggacctcatgccggaaaattggtcgcgattgtagatgttattgatcagaacagggctttggtcgatggaccttgcactcaagtgaggagacaggccatgcctttcaagtgcatgcagctcactgatttcatcctcaagtttccgcacagtgcccgccaaaagtatgtccaacaagcctggcagaaggcagacatcaatacaaaatgggcagccacacgatgggccaagaagattgaagccagagaaaggaaagccaagatgacagattttgatcgttttaaagttatgaaggcaaagaaaacgaggaacagaataatcaagaatgaagttaagaagcttcaaaaggcagctctcctgaaagcttctcccaaaaaagcacctggtactaagggtactgctgctgctgctgctgctgctgctgctgctaaagttccagcaaaaaagatgacggccgcgagtaaaaaggcttcagcccagaaggttcctgcccagaaagccacaggccagaaagcagcacctgctccaaaagctcagaagggtcaaaaagctccagcccagaaagcacctgctccaaaggcatctggcaagaaagcataagtggcaatcataaaaagtaataaaggttctttttgacctgtt

SEQ ID NO: 995 - DNA, 701 bp, Homo sapiens
gccaacatggtgttcaggcgcttcgtggaggttggccgggtggcctatgtctcctttggacctcatgccggaaaattggtcgcgattgtagatgttattgatcagaacagggctttggtcgatggaccttgcactcaagtgaggagacaggccatgcctttcaagtgcatgcagctcactgatttcatcctcaagtttccgcacagtgcccaccagaagtatgtccgacaagcctggcagaaggcagacatcaatacaaaatgggcagccacacgatgggccaagaagattgaagccagagaaaggaaagccaagatgacagattttgatcgttttaaagttatgaaggcaaagaaaatgaggaacagaataatcaagaatgaagttaagaagcttcaaaaggcagctctcctgaaagcttctcccaaaaaagcacctggtactaagggtactgctgctgctgctgctgctgctgctaaagttccagcaaaaaagatcaccgccgcgagtaaaaaggctccagcccagaaggttcctgcccagaaagccacaggccagaaagcagcgcctgctccaaaagctcagaagggtcaaaaagctccagcccagaaagcacctgctccaaaggcatctggcaagaaagcataagtggcaatcataaaaagtaataaaggttctttttgacctgttgaaaaaaaaaa

SEQ ID NO: 996 - DNA, 926 bp, Homo sapiens
gcacccagaattctaactaggatcttcaagaacaactctccccaggtcagtgcatggagcagaaagagaagggaaagggatagaatgtcttcatgactttaatcctagtatttgaaaaaaaataatcaaaccttgcacctacaaatttctgtcttgatccagaaagtcattagcataaaaaagataatagtggccttctcacctaacgccaccaacatggtgttcaggcgcttcgtggaggttggccgggtggcctatgtctcctttggacctcatgccggaaaattggtcgcgattgtagatgttattgatcagaacagggctttggtcgatggaccttgcactcaagtgaggagacaggccatgcctttcaagtgcatgcagctcactgatttcatcctcaagtttccgcacagtgcccgccaaaagtatgtccaacaagcctggcagaaggcagacatcaatacaaaatgggcagccacacgatgggccaagaagattgaagccagagaaaggaaagccaagatgacagattttgatcgttttaaagttatgaaggcaaagaaaacgaggaacagaataatcaagaatgaagttaagaagcttcaaaaggcagctctcctgaaagcttctcccaaaaaagcacctggtactaagggtactgctgctgctgctgctgctgctgctaaagttccagcaaaaaagatgacggccgcgagtaaaaaggcttcagcccagaaggttcctgcccagaaagccacaggccagaaagcagcacctgctccaaaagctcagaagggtcaaaaagctccagcccagaaagcacctgctccaaaggcatctggcaagaaagcataagtggcaatcataaaaagtaataaaggttctttttgacctgttggcaaatgtaaaaaaaaaaaaaaaag

SEQ ID NO: 997 - DNA, 1172 bp, Homo sapiens
ggtgagtcttactgttgcgggctccggggccgtcgaccatgccgctcgacctccacctccgctgggaagctgaggcgccgaacggctcccagagggtcccgggaagcgcatggtgagggtccccgggccggctgtgcagcggaatcgggcccttcccggactcgcgcccttcccggactcgccgctggcgagcgcgtggagggcccggcaggcctggcgcgccttgggccacgcgtgcgcgcctccgccgctggagctggatggctgatgcggctcgtggtccgagagccttgtcctgccgtgtgggccttgcggacctgggagctggtgggcgttgggaaccgggcttaagctactgaggcgtttgctgatttcgtccatccaggtgttcaggcgcttcgtggaggttggccgggtggcctatgtctcctttggacctcatgccggaaaattggtcgcgattgtagatgttattgatcagaacagggctttggtcgatggaccttgcactcaagtgaggagacaggccatgcctttcaagtgcatgcagctcactgatttcatcctcaagtttccgcacagtgcccaccagaagtatgtccgacaagcctggcagaaggcagacatcaatacaaaatgggcagccacacgatgggccaagaagattgaagccagagaaaggaaagccaagatgacagattttgatcgttttaaagttatgaaggcaaagaaaatgaggaacagaataatcaagaatgaagttaagaagcttcaaaaggcagctctcctgaaagcttctcccaaaaaagcacctggtactaagggtactgctgctgctgctgctgctgctgctgctgctgctgctaaagttccagcaaaaaagatcaccgccgcgagtaaaaaggctccagcccagaaggttcctgcccagaaagccacaggccagaaagcagcgcctgctccaaaagctcagaagggtcaaaaagctccagcccagaaagcacctgctccaaaggcatctggcaagaaagcataagtggcaatcataaaaagtaataaaggttctttttgacctgttgacaaatgtatttaagcctttggatttaaagcctgttgaggctggagttaggaggcagattgatagtaggattataataaacattaaataatca

SEQ ID NO: 998 - DNA, 435 bp, Homo sapiens
atgatgttcaagcacttcctggaggtttgccaggtggcctatgtctcctttggaccttatgctggaaagctggtcgcagttgtagatgttactgatgaaaacagggctctggctgatggactttgcactcaggtaatgggacaggccgtgtctttcaaatgcatgcagctcactgacttcatcctcaagttcccacatagcacccaccaaaggaagcttcgaaaggcagctctcctgaaagcttctaccagaaaagcacctgctgctaaagtcccagcaaaaaagatgatcactgcgggcaagaaggctccagcccggaagattcctgcccagaaagccacaggccagaaggcagcacttcttcagaaagctcagaagggtcaaaaagtgttggcccagggagcaccttctccaaaagtgtctggcaaggaagca

SEQ ID NO: 999 - DNA, 3170 bp, Homo sapiens
ggctggcccaggctacggcggctgcagggctccggcaaccgctccggcaacgccaaccgctccgctgcgcgcaggctgggctgcaggctctcggctgcagcgctgggtgtcttcaggcctatggagagcagcttgcgtgggctgggcctgcagtacctggtttgcatagatgattggcaggtggatctaggatccggcttccaacatgtggcagctctgggcctccctctgctgcctgctggtgttggccaatgcccggagcaggccctctttccatcccctgtcggatgagctggtcaactatgtcaacaaacggaataccacgtggcaggccgggcacaacttctacaacgtggacatgagctacttgaagaggctatgtggtaccttcctgggtgggcccaagccaccccagagagttatgtttaccgaggacctgaagctgcctgcaagcttcgatgcacgggaacaatggccacagtgtcccaccatcaaagagatcagagaccagggctcctgtggctcctgctgggccttcggggctgtggaagccatctctgaccggatctgcatccacaccaatgcgcacgtcagcgtggaggtgtcggcggaggacctgctcacctgctgtggcagcatgtgtggggacggctgtaatggtggctatcctgctgaagcttggaacttctggacaagaaaaggcctggtttctggtggcctctatgaatcccatgtagggtgcagaccgtactccatccctccctgtgagcaccacgtcaacggctcccggcccccatgcacgggggagggagatacccccaagtgtagcaagatctgtgagcctggctacagcccgacctacaaacaggacaagcactacggatacaattcctacagcgtctccaatagcgagaaggacatcatggccgagatctacaaaaacggccccgtggagggagctttctctgtgtattcggacttcctgctctacaagtcaggagtgtaccaacacgtcaccggagagatgatgggtggccatgccatccgcatcctgggctggggagtggagaatggcacaccctactggctggttgccaactcctggaacactgactggggtgacaatggcttctttaaaatactcagaggacaggatcactgtggaatcgaatcagaagtggtggctggaattccacgcaccgatcagtactgggaaaagatctaatctgccgtgggcctgtcgtgccagtcctgggggcgagatcggggtagaaatgcattttattctttaagttcacgtaagatacaagtttcagacagggtctgaaggactggattggccaaacatcagacctgtcttccaaggagaccaagtcctggctacatcccagcctgtggttacagtgcagacaggccatgtgagccaccgctgccagcacagagcgtccttccccctgtagactagtgccgtagggagtacctgctgccccagctgactgtggccccctccgtgatccatccatctccagggagcaagacagagacgcaggaatggaaagcggagttcctaacaggatgaaagttcccccatcagttcccccagtacctccaagcaagtagctttccacatttgtcacagaaatcagaggagagatggtgttgggagccctttggagaacgccagtctcccaggccccctgcatctatcgagtttgcaatgtcacaacctctctgatcttgtgctcagcatgattctttaatagaagttttattttttcgtgcactctgctaatcatgtgggtgagccagtggaacagcgggagacctgtgctagttttacagattgcctccttatgacgcggctcaaaaggaaaccaagtggtcaggagttgtttctgacccactgatctctactaccacaaggaaaatagtttaggagaaaccagcttttactgtttttgaaaaattacagcttcaccctgtcaagttaacaaggaatgcctgtgccaataaaaggtttctccaacttgaagtctactctgatgggatctcagatcctttgtcactgcctatagacttgtagctgctgtctctctttgtccctgcagagaatcacgtcctggaactgcatgttcttgcgactcttgggacttcatcttaacttctcgctgccccagccatgttttcaaccatggcatccctcccccaattagttccctgtcatcctcgtcaaccttctctgtaagtgcctggtaagcttgcccttgcttaagaactcaaaacatagctgtgctctatttttttgttgttgttgtgactgacagagtgagattccgtctcccaggctggagtgcagtggcgccttctcagctcactgcaacctgcagcctcctagattcaagcgattctcctgcttcagccttccgagtagctgggatgacaggcactcaccaatatgcctgggtaatttttgtatttttaagtacatacaggatttcaccatgttggccaggctagtttcaaactcccggcctcaggtggtctgcctgcctcagcctcccaaagtgttgggattacaggtgtgagccactgggccctgcctgtactttttatcagccacaaatccagcaacaagctgaggattcagctcataaaacaggtttggtgtcttggtgatctcacataaccaagatgctaccccgtggggaaccacatccccctggatgccctccagccttggtttgggctggagtcagggcctgtatacagtattttgaatttgtatgccactggtttgcattgctggtcaggaactctagtgctttgcatagccctggtttagaaacatgttatagcagttcttggtatagagcaaactagaagaaccagcaatcattccactgtcctgccaaggtacacctcagtactccccttcccaactgaagtggtatgaggctagctctttccaaaagcattcaagtttggcttctgatgtgactcagaatttaggaaccagatgctagatcaaataagctctgaaaatctgaggaacattgtaggaaaggtttgttaagcatctcttaagtgccatgatgagcataacagccggccgtggtggctcacgcctgtaatcccagcactttgggaggccaaggtgggaggatgacaag

SEQ ID NO: 1000 - DNA, 3190 bp, Homo sapiens
acggcggctgcagggctccggcaaccgctccggcaacgccaaccgctccgctgcgcgcaggctgggctgcaggctctcggctgcagcgctggggtcttgctttgtctcccaggctggtgtgcagtggtgcgaccacggctcacggcagcctcagccacccagatgtaagcgatctggttcccacctcagcctcccgagtagtggatctaggatccggcttccaacatgtggcagctctgggcctccctctgctgcctgctggtgttggccaatgcccggagcaggccctctttccatcccctgtcggatgagctggtcaactatgtcaacaaacggaataccacgtggcaggccgggcacaacttctacaacgtggacatgagctacttgaagaggctatgtggtaccttcctgggtgggcccaagccaccccagagagttatgtttaccgaggacctgaagctgcctgcaagcttcgatgcacgggaacaatggccacagtgtcccaccatcaaagagatcagagaccagggctcctgtggctcctgctgggccttcggggctgtggaagccatctctgaccggatctgcatccacaccaatgcgcacgtcagcgtggaggtgtcggcggaggacctgctcacctgctgtggcagcatgtgtggggacggctgtaatggtggctatcctgctgaagcttggaacttctggacaagaaaaggcctggtttctggtggcctctatgaatcccatgtagggtgcagaccgtactccatccctccctgtgagcaccacgtcaacggctcccggcccccatgcacgggggagggagatacccccaagtgtagcaagatctgtgagcctggctacagcccgacctacaaacaggacaagcactacggatacaattcctacagcgtctccaatagcgagaaggacatcatggccgagatctacaaaaacggccccgtggagggagctttctctgtgtattcggacttcctgctctacaagtcaggagtgtaccaacacgtcaccggagagatgatgggtggccatgccatccgcatcctgggctggggagtggagaatggcacaccctactggctggttgccaactcctggaacactgactggggtgacaatggcttctttaaaatactcagaggacaggatcactgtggaatcgaatcagaagtggtggctggaattccacgcaccgatcagtactgggaaaagatctaatctgccgtgggcctgtcgtgccagtcctgggggcgagatcggggtagaaatgcattttattctttaagttcacgtaagatacaagtttcagacagggtctgaaggactggattggccaaacatcagacctgtcttccaaggagaccaagtcctggctacatcccagcctgtggttacagtgcagacaggccatgtgagccaccgctgccagcacagagcgtccttccccctgtagactagtgccgtagggagtacctgctgccccagctgactgtggccccctccgtgatccatccatctccagggagcaagacagagacgcaggaatggaaagcggagttcctaacaggatgaaagttcccccatcagttcccccagtacctccaagcaagtagctttccacatttgtcacagaaatcagaggagagatggtgttgggagccctttggagaacgccagtctcccaggccccctgcatctatcgagtttgcaatgtcacaacctctctgatcttgtgctcagcatgattctttaatagaagttttattttttcgtgcactctgctaatcatgtgggtgagccagtggaacagcgggagacctgtgctagttttacagattgcctccttatgacgcggctcaaaaggaaaccaagtggtcaggagttgtttctgacccactgatctctactaccacaaggaaaatagtttaggagaaaccagcttttactgtttttgaaaaattacagcttcaccctgtcaagttaacaaggaatgcctgtgccaataaaaggtttctccaacttgaagtctactctgatgggatctcagatcctttgtcactgcctatagacttgtagctgctgtctctctttgtccctgcagagaatcacgtcctggaactgcatgttcttgcgactcttgggacttcatcttaacttctcgctgccccagccatgttttcaaccatggcatccctcccccaattagttccctgtcatcctcgtcaaccttctctgtaagtgcctggtaagcttgcccttgcttaagaactcaaaacatagctgtgctctatttttttgttgttgttgtgactgacagagtgagattccgtctcccaggctggagtgcagtggcgccttctcagctcactgcaacctgcagcctcctagattcaagcgattctcctgcttcagccttccgagtagctgggatgacaggcactcaccaatatgcctgggtaatttttgtatttttaagtacatacaggatttcaccatgttggccaggctagtttcaaactcccggcctcaggtggtctgcctgcctcagcctcccaaagtgttgggattacaggtgtgagccactgggccctgcctgtactttttatcagccacaaatccagcaacaagctgaggattcagctcataaaacaggtttggtgtcttggtgatctcacataaccaagatgctaccccgtggggaaccacatccccctggatgccctccagccttggtttgggctggagtcagggcctgtatacagtattttgaatttgtatgccactggtttgcattgctggtcaggaactctagtgctttgcatagccctggtttagaaacatgttatagcagttcttggtatagagcaaactagaagaaccagcaatcattccactgtcctgccaaggtacacctcagtactccccttcccaactgaagtggtatgaggctagctctttccaaaagcattcaagtttggcttctgatgtgactcagaatttaggaaccagatgctagatcaaataagctctgaaaatctgaggaacattgtaggaaaggtttgttaagcatctcttaagtgccatgatgagcataacagccggccgtggtggctcacgcctgtaatcccagcactttgggaggccaaggtgggaggatgacaag

SEQ ID NO: 1001 - DNA, 1978 bp, Homo sapiens
gggagggtacttagggccggggctggcccaggctacggcggctgcagggctccggcaaccgctccggcaacgccaaccgctccgctgcgcgcaggctgggctgcaggctctcggctgcagcgctgggtggatctaggatccggcttccaacatgtggcagctctgggcctccctctgctgcctgctggtgttggccaatgcccggagcaggccctctttccatcccctgtcggatgagctggtcaactatgtcaacaaacggaataccacgtggcaggccgggcacaacttctacaacgtggacatgagctacttgaagaggctatgtggtaccttcctgggtgggcccaagccaccccagagagttatgtttaccgaggacctgaagctgcctgcaagcttcgatgcacgggaacaatggccacagtgtcccaccatcaaagagatcagagaccagggctcctgtggctcctgctgggccttcggggctgtggaagccatctctgaccggatctgcatccacaccaatgcgcacgtcagcgtggaggtgtcggcggaggacctgctcacatgctgtggcagcatgtgtggggacggctgtaatggtggctatcctgctgaagcttggaacttctggacaagaaaaggcctggtttctggtggcctctatgaatcccatgtagggtgcagaccgtactccatccctccctgtgagcaccacgtcaacggctcccggcccccatgcacgggggagggagatacccccaagtgtagcaagatctgtgagcctggctacagcccgacctacaaacaggacaagcactacggatacaattcctacagcgtctccaatagcgagaaggacatcatggccgagatctacaaaaacggccccgtggagggagctttctctgtgtattcggacttcctgctctacaagtcaggagtgtaccaacacgtcaccggagagatgatgggtggccatgccatccgcatcctgggctggggagtggagaatggcacaccctactggctggttgccaactcctggaacactgactggggtgacaatggcttctttaaaatactcagaggacaggatcactgtggaatcgaatcagaagtggtggctggaattccacgcaccgatcagtactgggaaaagatctaatctgccgtgggcctgtcgtgccagtcctgggggcgagatcggggtagaaatgcattttattctttaagttcacgtaagatacaagtttcagacagggtctgaaggactggattggccaaacatcagacctgtcttccaaggagaccaagtcctggctacatcccagcctgtggttacagtgcagacaggccatgtgagccaccgctgccagcacagagcgtccttccccctgtagactagtgccgtagggagtacctgctgccccagctgactgtggccccctccgtgatccatccatctccagggagcaagacagagacgcaggaatggaaagcggagttcctaacaggatgaaagttcccccatcagttcccccagtacctccaagcaagtagctttccacatttgtcacagaaatcagaggagagatggtgttgggagccctttggagaacgccagtctcccaggccccctgcatctatcgagtttgcaatgtcacaacctctctgatcttgtgctcagcatgattctttaatagaagttttattttttcgtgcactctgctaatcatgtgggtgagccagtggaacagcgggagacctgtgctagttttacagattgcctcctaatgacgcggctcaaaaggaaaccaagtggtcaggagttgtttctgacccactgatctctactaccacaaggaaaatagtttaggagaaaccagcttttactgtttttgaaaaattacagcttcaccctgtcaagttaacaaggaatgcctgtgccaataaaagttttctccaacttgaa

SEQ ID NO: 1002 - DNA, 2002 bp, Homo sapiens
aattccgcggcaaccgctccggcaacgccaaccgctccgctgcgcgcaggctgggctgcaggctctcggctgcagcgctgggctggtgtgcagtggtgcgaccacggctcacggcagcctcagccacccagatgtaagcgatctggttcccacctcagccttccgagtagtggatctaggatctggcttccaacatgtggcagctctgggcctccctctgctgcctgctggtgttggccaatgcccggagcaggccctctttccatcccgtgtcggatgagctggtcaactatgtcaacaaacggaataccacgtggcaggccgggcacaacttctacaacgtggacatgagctacttgaagaggctatgtggtaccttcctgggtgggcccaagccaccccagagagttatgtttaccgaggacctgaagctgcctgcaagcttcgatgcacgggaacaatggccacagtgtcccaccatcaaagagatcagagaccagggctcctgtggctcctgctgggccttcggggctgtggaagccatctctgaccgcatctgcatccacaccaatgcgcacgtcagcgtggaggtgtcggcggaggacctgctcacctgctgtggcagcatgtgtggggacggctgtaatggtggctatcctgctgaagcttggaacttctggacaagaaaaggcctggtttctggtggcctctatgaatcccatgtagggtgcagaccgtactccatccctccctgtgagcaccacgtcaacggctcccggcccccatgcacgggggagggagatacccccaagtgtagcaagatctgtgagcctggctacagcccgacctacaaacaggacaagcactacggatacaattcctacagcgtctccaatagcgagaaggacatcatggccgagatctacaaaaacggccccgtggagggagctttctctgtgtattcggacttcctgctctacaagtcaggagtgtaccaacacgtcaccggagagatgatgggtggccatgccatccgcatcctgggctggggagtggagaatggcacaccctactggctggttgccaactcctggaacactgactggggtgacaatggcttctttaaaatactcagaggacaggatcactgcggaatcgaatcagaagtggtggctggaattccacgcaccgatcagtactgggaaaagatctaatctgccgtgggcctgtcgtgccagtcctgggggcgagatcggggtagaaagtcattttattctttaagttcacgtaagatacaagtttcaggcagggtctgaaggactggattggccaaagtcctccaaggagaccaagtcctggctacatcccagcctgtggttacagtgcagacaggccatgtgagccaccgctgccagcacagagcgtccttccccctgtagactagtgccgtgggagtacctgctgcccagctgctgtggccccctccgtgatccatccatctccagggagcaagacagagacgcaggatggaaagcggagttcctaacaggatgaaagttcccccatcagttcccccagtacctccaagcaagtagctttccacatttgtcacagaaatcagaggagagatggtgttgggagccctttggagaacgccagtctccaggtccccctgcatctatcgagtttgcaatgtcacaacctctctgatcttgtgctcagcatgattctttaatagaagttttatttttcgtgcactctgctaatcatgtgggtgagccagtggaacagcgggagcctgtgctggtttgcagattgcctcctaatgacgcggctcaaaaggaaaccaagtggtcaggagttgtttctgacccactgatctctactaccacaaggaaaatagtttaggagaaaccagcttttactgtttttgaaaaattacagcttcaccctgtcaagttaacaaggaatgcctgtgccaataaaaggtttctccaacttg

SEQ ID NO: 1003 - DNA, 2988 bp, Homo sapiens
acttagggccggggctggcccaggctacggcggcaaccgctccggcaacgccaaccgctccgctgcgcgcaggctgggctgcaggctctcggctgcagcgctgggtggatctaggatccggcttccaacatgtggcagctctgggcctccctctgctgcctgctggtgttggccaatgcccggagcaggccctctttccatcccctgtcggatgagctggtcaactatgtcaacaaacggaataccacgtggcaggccgggcacaacttctacaacgtggacatgagctacttgaagaggctatgtggtaccttcctgggtgggcccaagccaccccagagagttatgtttaccgaggacctgaagctgcctgcaagcttcgatgcacgggaacaatggccacagtgtcccaccatcaaagagatcagagaccagggctcctgtggctcctgctgggccttcggggctgtggaagccatctctgaccggatctgcatccacaccaatgcgcacgtcagcgtggaggtgtcggcggaggacctgctcacctgctgtggcagcatgtgtggggacggctgtaatggtggctatcctgctgaagcttggaacttctggacaagaaaaggcctggtttctggtggcctctatgaatcccatgtagggtgcagaccgtactccatccctccctgtgagcaccacgtcaacggctcccggcccccatgcacgggggagggagatacccccaagtgtagcaagatctgtgagcctggctacagcccgacctacaaacaggacaagcactacggatacaattcctacagcgtctccaatagcgagaaggacatcatggccgagatctacaaaaacggccccgtggagggagctttctctgtgtattcggacttcctgctctacaagtcaggagtgtaccaacacgtcaccggagagatgatgggtggccatgccatccgcatcctgggctggggagtggagaatggcacaccctactggctggttgccaactcctggaacactgactggggtgacaatggcttctttaaaatactcagaggacaggatcactgtggaatcgaatcagaagtggtggctggaattccacgcaccgatcagtactgggaaaagatctaatctgccgtgggcctgtcgtgccagtcctgggggcgagatcgggagaatcacgtcctggaactgcatgttcttgcgactcttgggacttcatcttaacttctcgctgccccagccatgttttcaaccatggcatccctcccccaattagttccctgtcatcctcgtcaaccttctctgtaagtgcctggtaagcttgcccttgcttaagaactcaaaacatagctgtgctctatttttttgttgttgttgtgactgacagagtgagattccgtctcccaggctggagtgcagtggcgccttctcagctcactgcaacctgcagcctcctagattcaagcgattctcctgcttcagccttccgagtagctgggatgacaggcactcaccaatatgcctgggtaatttttgtatttttaagtacatacaggatttcaccatgttggccaggctagtttcaaactcccggcctcaggtggtctgcctgcctcagcctcccaaagtgttgggattacaggtgtgagccactgggccctgcctgtactttttatcagccacaaatccagcaacaagctgaggattcagctcataaaacaggtttggtgtcttggtgatctcacataaccaagatgctaccccgtggggaaccacatccccctggatgccctccagccttggtttgggctggagtcagggcctgtatacagtattttgaatttgtatgccactggtttgcattgctggtcaggaactctagtgctttgcatagccctggtttagaaacatgttatagcagttcttggtatagagcaaactagaagaaccagcaatcattccactgtcctgccaaggtacacctcagtactccccttcccaactgaagtggtatgaggctagctctttccaaaagcattcaagtttggcttctgatgtgactcagaatttaggaaccagatgctagatcaaataagctctgaaaatctgaggaacattgtaggaaaggtttgttaagcatctcttaagtgccatgatgagcataacagccggccgtggtggctcacgcctgtaatcccagcactttgggaggccaaggtgggaggatgacaaggtcaggagttttgagatcagccttggcaacacggtgaaaccccatctctactaaaaatacaaaattagccaagcatgctggcacatgcctgtaatcccagctactcgggaggctgaggtacgagaatcgcttgaacctgggaggcagaggatgcagtgagccgagatcacgccattgcactccagcctgggggacaagagtgaatctgtgtctcaccaaaaaaaaaaagaaaaagaaagatgcttaacaaaggttaccataagccacaaattcataaccacttatccttccagtttcaagtagaatatattcataacctcaataaagttctccctgctcccaaactgagttgattcattccatgcgcactgtctccctcacctccatcgtatacgcacctgcagctccttgcctgcttctagcatggagccagcggggatgtgctggtgagtgacaaggaattgtggggcatgtcgacatcagcttaaggctttgttagaaacacctgccttgcagtgtttgtgactgggaaagagctcagtgttttaatacacctcagatcaccacattgatcataactttgtcacctcagttcaatagtttctcctggattcttgtccaagtgagatgacaggtggacgtaacaatgccttttcagtctttacctagactctccagagaatcactccagaatagaaattagagtataggtaggcagtccaacctctgcattt

SEQ ID NO: 1004 - DNA, 4001 bp, Homo sapiens
tagggccggggctggcccaggctacggcggctgcagggctccggcaaccgctccggcaacgccaaccgctccgctgcgcgcaggctgggctgcaggctctcggctgcagcgctgggctggtgtgcagtggtgcgaccacggctcacggcagcctcagccacccagatgtaagcgatctggttcccacctcagcctcccgagtagtgtcttcaggcctatggagagcagcttgcgtgggctgggcctgcagtacctggtttgcatagatgattggcaggtggatctaggatccggcttccaacatgtggcagctctgggcctccctctgctgcctgctggtgttggccaatgcccggagcaggccctctttccatcccctgtcggatgagctggtcaactatgtcaacaaacggaataccacgtggcaggccgggcacaacttctacaacgtggacatgagctacttgaagaggctatgtggtaccttcctgggtgggcccaagccaccccagagagttatgtttaccgaggacctgaagctgcctgcaagcttcgatgcacgggaacaatggccacagtgtcccaccatcaaagagatcagagaccagggctcctgtggctcctgctgggccttcggggctgtggaagccatctctgaccggatctgcatccacaccaatgcgcacgtcagcgtggaggtgtcggcggaggacctgctcacctgctgtggcagcatgtgtggggacggctgtaatggtggctatcctgctgaagcttggaacttctggacaagaaaaggcctggtttctggtggcctctatgaatcccatgtagggtgcagaccgtactccatccctccctgtgagcaccacgtcaacggctcccggcccccatgcacgggggagggagatacccccaagtgtagcaagatctgtgagcctggctacagcccgacctacaaacaggacaagcactacggatacaattcctacagcgtctccaatagcgagaaggacatcatggccgagatctacaaaaacggccccgtggagggagctttctctgtgtattcggacttcctgctctacaagtcaggagtgtaccaacacgtcaccggagagatgatgggtggccatgccatccgcatcctgggctggggagtggagaatggcacaccctactggctggttgccaactcctggaacactgactggggtgacaatggcttctttaaaatactcagaggacaggatcactgtggaatcgaatcagaagtggtggctggaattccacgcaccgatcagtactgggaaaagatctaatctgccgtgggcctgtcgtgccagtcctgggggcgagatcggggtagaaatgcattttattctttaagttcacgtaagatacaagtttcagacagggtctgaaggactggattggccaaacatcagacctgtcttccaaggagaccaagtcctggctacatcccagcctgtggttacagtgcagacaggccatgtgagccaccgctgccagcacagagcgtccttccccctgtagactagtgccgtagggagtacctgctgccccagctgactgtggccccctccgtgatccatccatctccagggagcaagacagagacgcaggaatggaaagcggagttcctaacaggatgaaagttcccccatcagttcccccagtacctccaagcaagtagctttccacatttgtcacagaaatcagaggagagatggtgttgggagccctttggagaacgccagtctcccaggccccctgcatctatcgagtttgcaatgtcacaacctctctgatcttgtgctcagcatgattctttaatagaagttttattttttcgtgcactctgctaatcatgtgggtgagccagtggaacagcgggagacctgtgctagttttacagattgcctccttatgacgcggctcaaaaggaaaccaagtggtcaggagttgtttctgacccactgatctctactaccacaaggaaaatagtttaggagaaaccagcttttactgtttttgaaaaattacagcttcaccctgtcaagttaacaaggaatgcctgtgccaataaaaggtttctccaacttgaagtctactctgatgggatctcagatcctttgtcactgcctatagacttgtagctgctgtctctctttgtccctgcagagaatcacgtcctggaactgcatgttcttgcgactcttgggacttcatcttaacttctcgctgccccagccatgttttcaaccatggcatccctcccccaattagttccctgtcatcctcgtcaaccttctctgtaagtgcctggtaagcttgcccttgcttaagaactcaaaacatagctgtgctctatttttttgttgttgttgtgactgacagagtgagattccgtctcccaggctggagtgcagtggcgccttctcagctcactgcaacctgcagcctcctagattcaagcgattctcctgcttcagccttccgagtagctgggatgacaggcactcaccaatatgcctgggtaatttttgtatttttaagtacatacaggatttcaccatgttggccaggctagtttcaaactcccggcctcaggtggtctgcctgcctcagcctcccaaagtgttgggattacaggtgtgagccactgggccctgcctgtactttttatcagccacaaatccagcaacaagctgaggattcagctcataaaacaggtttggtgtcttggtgatctcacataaccaagatgctaccccgtggggaaccacatccccctggatgccctccagccttggtttgggctggagtcagggcctgtatacagtattttgaatttgtatgccactggtttgcattgctggtcaggaactctagtgctttgcatagccctggtttagaaacatgttatagcagttcttggtatagagcaaactagaagaaccagcaatcattccactgtcctgccaaggtacacctcagtactccccttcccaactgaagtggtatgaggctagctctttccaaaagcattcaagtttggcttctgatgtgactcagaatttaggaaccagatgctagatcaaataagctctgaaaatctgaggaacattgtaggaaaggtttgttaagcatctcttaagtgccatgatgagcataacagccggccgtggtggctcacgcctgtaatcccagcactttgggaggccaaggtgggaggatgacaaggtcaggagttttgagatcagccttggcaacacggtgaaaccccatctctactaaaaatacaaaattagccaagcatgctggcacatgcctgtaatcccagctactcgggaggctgaggtacgagaatcgcttgaacctgggaggcagaggatgcagtgagccgagatcacgccattgcactccagcctgggggacaagagtgaatctgtgtctcaccaaaaaaaaaaagaaaaagaaagatgcttaacaaaggttaccataagccacaaattcataaccacttatccttccagtttcaagtagaatatattcataacctcaataaagttctccctgctcccaaactgagttgattcattccatgcgcactgtctccctcacctccatcgtatacgcacctgcagctccttgcctgcttctagcatggagccagcggggatgtgctggtgagtgacaaggaattgtggggcatgtcgacatcagcttaaggctttgttagaaacacctgccttgcagtgtttgtgactgggaaagagctcagtgttttaatacacctcagatcaccacattgatcataactttgtcacctcagttcaatagtttctcctggattcttgtccaagtgagatgacaggtggacgtaacaatgccttttcagtctttacctagactctccagagaatcactccagaatagaaattagagtataggtaggcagtccaacctctgcattt

SEQ ID NO: 1005 - DNA, 3193 bp, Homo sapiens
tagggccggggctggcccaggctacggcggctgcagggctccggcaaccgctccggcaacgccaaccgctccgctgcgcgcaggctgggctgcaggctctcggctgcagcgctgggctggtgtgcagtggtgcgaccacggctcacggcagcctcagccacccagatgtaagcgatctggttcccacctcagcctcccgagtagtggatctaggatccggcttccaacatgtggcagctctgggcctccctctgctgcctgctggtgttggccaatgcccggagcaggccctctttccatcccctgtcggatgagctggtcaactatgtcaacaaacggaataccacgtggcaggccgggcacaacttctacaacgtggacatgagctacttgaagaggctatgtggtaccttcctgggtgggcccaagccaccccagagagttatgtttaccgaggacctgaagctgcctgcaagcttcgatgcacgggaacaatggccacagtgtcccaccatcaaagagatcagagaccagggctcctgtggctcctgctgggccttcggggctgtggaagccatctctgaccggatctgcatccacaccaatgcgcacgtcagcgtggaggtgtcggcggaggacctgctcacctgctgtggcagcatgtgtggggacggctgtaatggtggctatcctgctgaagcttggaacttctggacaagaaaaggcctggtttctggtggcctctatgaatcccatgtagggtgcagaccgtactccatccctccctgtgagcaccacgtcaacggctcccggcccccatgcacgggggagggagatacccccaagtgtagcaagatctgtgagcctggctacagcccgacctacaaacaggacaagcactacggatacaattcctacagcgtctccaatagcgagaaggacatcatggccgagatctacaaaaacggccccgtggagggagctttctctgtgtattcggacttcctgctctacaagtcaggagtgtaccaacacgtcaccggagagatgatgggtggccatgccatccgcatcctgggctggggagtggagaatggcacaccctactggctggttgccaactcctggaacactgactggggtgacaatggcttctttaaaatactcagaggacaggatcactgtggaatcgaatcagaagtggtggctggaattccacgcaccgatcagtactgggaaaagatctaatctgccgtgggcctgtcgtgccagtcctgggggcgagatcggggtagaaatgcattttattctttaagttcacgtaagatacaagtttcagacagggtctgaaggactggattggccaaacatcagacctgtcttccaaggagaccaagtcctggctacatcccagcctgtggttacagtgcagacaggccatgtgagccaccgctgccagcacagagcgtccttccccctgtagactagtgccgtagggagtacctgctgccccagctgactgtggccccctccgtgatccatccatctccagggagcaagacagagacgcaggaatggaaagcggagttcctaacaggatgaaagttcccccatcagttcccccagtacctccaagcaagtagctttccacatttgtcacagaaatcagaggagagatggtgttgggagccctttggagaacgccagtctcccaggccccctgcatctatcgagtttgcaatgtcacaacctctctgatcttgtgctcagcatgattctttaatagaagttttattttttcgtgcactctgctaatcatgtgggtgagccagtggaacagcgggagacctgtgctagttttacagattgcctccttatgacgcggctcaaaaggaaaccaagtggtcaggagttgtttctgacccactgatctctactaccacaaggaaaatagtttaggagaaaccagcttttactgtttttgaaaaattacagcttcaccctgtcaagttaacaaggaatgcctgtgccaataaaaggtttctccaacttgaagtctactctgatgggatctcagatcctttgtcactgcctatagacttgtagctgctgtctctctttgtccctgcagagaatcacgtcctggaactgcatgttcttgcgactcttgggacttcatcttaacttctcgctgccccagccatgttttcaaccatggcatccctcccccaattagttccctgtcatcctcgtcaaccttctctgtaagtgcctggtaagcttgcccttgcttaagaactcaaaacatagctgtgctctatttttttgttgttgttgtgactgacagagtgagattccgtctcccaggctggagtgcagtggcgccttctcagctcactgcaacctgcagcctcctagattcaagcgattctcctgcttcagccttccgagtagctgggatgacaggcactcaccaatatgcctgggtaatttttgtatttttaagtacatacaggatttcaccatgttggccaggctagtttcaaactcccggcctcaggtggtctgcctgcctcagcctcccaaagtgttgggattacaggtgtgagccactgggccctgcctgtactttttatcagccacaaatccagcaacaagctgaggattcagctcataaaacaggtttggtgtcttggtgatctcacataaccaagatgctaccccgtggggaaccacatccccctggatgccctccagccttggtttgggctggagtcagggcctgtatacagtattttgaatttgtatgccactggtttgcattgctggtcaggaactctagtgctttgcatagccctggtttagaaacatgttatagcagttcttggtatagagcaaactagaagaaccagcaatcattccactgtcctgccaaggtacacctcagtactccccttcccaactgaagtggtatgaggctagctctttccaaaagcattcaagtttggcttctgatgtgactcagaatttaggaaccagatgctagatcaaataagctctgaaaatctgaggaacattgtaggaaaggtttgttaagcatctcttaagtgccatgatgagcataacagccggccgtggtggctcacgcctgtaatcccagcactttgggaggccaaggtgggaggatgacaag

SEQ ID NO: 1006 - DNA, 3039 bp, Homo sapiens
cggcaaccgctccggcaacgccaaccgctccgctgcgcgcaggctgggctgcaggctctcggctgcagcgctggatgtggcagctctgggcctccctctgctgcctgctggtgttggccaatgcccggagcaggccctctttccatcccctgtcggatgagctggtcaactatgtcaacaaacggaataccacgtggcaggccgggcacaacttctacaacgtggacatgagctacttgaagaggctatgtggtaccttcctgggtgggcccaagccaccccagagagttatgtttaccgaggacctgaagctgcctgcaagcttcgatgcacgggaacaatggccacagtgtcccaccatcaaagagatcagagaccagggctcctgtggctcctgctgggccttcggggctgtggaagccatctctgaccggatctgcatccacaccaatgcgcacgtcagcgtggaggtgtcggcggaggacctgctcacctgctgtggcagcatgtgtggggacggctgtaatggtggctatcctgctgaagcttggaacttctggacaagaaaaggcctggtttctggtggcctctatgaatcccatgtagggtgcagaccgtactccatccctccctgtgagcaccacgtcaacggctcccggcccccatgcacgggggagggagatacccccaagtgtagcaagatctgtgagcctggctacagcccgacctacaaacaggacaagcactacggatacaattcctacagcgtctccaatagcgagaaggacatcatggccgagatctacaaaaacggccccgtggagggagctttctctgtgtattcggacttcctgctctacaagtcaggagtgtaccaacacgtcaccggagagatgatgggtggccatgccatccgcatcctgggctggggagtggagaatggcacaccctactggctggttgccaactcctggaacactgactggggtgacaatggcttctttaaaatactcagaggacaggatcactgtggaatcgaatcagaagtggtggctggaattccacgcaccgatcagtactgggaaaagatctaatctgccgtgggcctgtcgtgccagtcctgggggcgagatcggggtagaaatgcattttattctttaagttcacgtaagatacaagtttcagacagggtctgaaggactggattggccaaacatcagacctgtcttccaaggagaccaagtcctggctacatcccagcctgtggttacagtgcagacaggccatgtgagccaccgctgccagcacagagcgtccttccccctgtagactagtgccgtagggagtacctgctgccccagctgactgtggccccctccgtgatccatccatctccagggagcaagacagagacgcaggaatggaaagcggagttcctaacaggatgaaagttcccccatcagttcccccagtacctccaagcaagtagctttccacatttgtcacagaaatcagaggagagatggtgttgggagccctttggagaacgccagtctcccaggccccctgcatctatcgagtttgcaatgtcacaacctctctgatcttgtgctcagcatgattctttaatagaagttttattttttcgtgcactctgctaatcatgtgggtgagccagtggaacagcgggagacctgtgctagttttacagattgcctccttatgacgcggctcaaaaggaaaccaagtggtcaggagttgtttctgacccactgatctctactaccacaaggaaaatagtttaggagaaaccagcttttactgtttttgaaaaattacagcttcaccctgtcaagttaacaaggaatgcctgtgccaataaaaggtttctccaacttgaagtctactctgatgggatctcagatcctttgtcactgcctatagacttgtagctgctgtctctctttgtccctgcagagaatcacgtcctggaactgcatgttcttgcgactcttgggacttcatcttaacttctcgctgccccagccatgttttcaaccatggcatccctcccccaattagttccctgtcatcctcgtcaaccttctctgtaagtgcctggtaagcttgcccttgcttaagaactcaaaacatagctgtgctctatttttttgttgttgttgtgactgacagagtgagattccgtctcccaggctggagtgcagtggcgccttctcagctcactgcaacctgcagcctcctagattcaagcgattctcctgcttcagccttccgagtagctgggatgacaggcactcaccaatatgcctgggtaatttttgtatttttaagtacatacaggatttcaccatgttggccaggctagtttcaaactcccggcctcaggtggtctgcctgcctcagcctcccaaagtgttgggattacaggtgtgagccactgggccctgcctgtactttttatcagccacaaatccagcaacaagctgaggattcagctcataaaacaggtttggtgtcttggtgatctcacataaccaagatgctaccccgtggggaaccacatccccctggatgccctccagccttggtttgggctggagtcagggcctgtatacagtattttgaatttgtatgccactggtttgcattgctggtcaggaactctagtgctttgcatagccctggtttagaaacatgttatagcagttcttggtatagagcaaactagaagaaccagcaatcattccactgtcctgccaaggtacacctcagtactccccttcccaactgaagtggtatgaggctagctctttccaaaagcattcaagtttggcttctgatgtgactcagaatttaggaaccagatgctagatcaaataagctctgaaaatctgaggaacattgtaggaaaggtttgttaagcatctcttaagtgccatgatgagcataacagccggccgtggtggctcacgcctgtaatcccagcactttgggaggccaaggtgggaggatgacaag

SEQ ID NO: 1007 - DNA, 3267 bp, Homo sapiens
tagggccggggctggcccaggctacggcggctgcagggctccggcaaccgctccggcaacgccaaccgctccgctgcgcgcaggctgggctgcaggctctcggctgcagcgctgggctggtgtgcagtggtgcgaccacggctcacggcagcctcagccacccagatgtaagcgatctggttcccacctcagcctcccgagtagtgtcttcaggcctatggagagcagcttgcgtgggctgggcctgcagtacctggtttgcatagatgattggcaggtggatctaggatccggcttccaacatgtggcagctctgggcctccctctgctgcctgctggtgttggccaatgcccggagcaggccctctttccatcccctgtcggatgagctggtcaactatgtcaacaaacggaataccacgtggcaggccgggcacaacttctacaacgtggacatgagctacttgaagaggctatgtggtaccttcctgggtgggcccaagccaccccagagagttatgtttaccgaggacctgaagctgcctgcaagcttcgatgcacgggaacaatggccacagtgtcccaccatcaaagagatcagagaccagggctcctgtggctcctgctgggccttcggggctgtggaagccatctctgaccggatctgcatccacaccaatgcgcacgtcagcgtggaggtgtcggcggaggacctgctcacctgctgtggcagcatgtgtggggacggctgtaatggtggctatcctgctgaagcttggaacttctggacaagaaaaggcctggtttctggtggcctctatgaatcccatgtagggtgcagaccgtactccatccctccctgtgagcaccacgtcaacggctcccggcccccatgcacgggggagggagatacccccaagtgtagcaagatctgtgagcctggctacagcccgacctacaaacaggacaagcactacggatacaattcctacagcgtctccaatagcgagaaggacatcatggccgagatctacaaaaacggccccgtggagggagctttctctgtgtattcggacttcctgctctacaagtcaggagtgtaccaacacgtcaccggagagatgatgggtggccatgccatccgcatcctgggctggggagtggagaatggcacaccctactggctggttgccaactcctggaacactgactggggtgacaatggcttctttaaaatactcagaggacaggatcactgtggaatcgaatcagaagtggtggctggaattccacgcaccgatcagtactgggaaaagatctaatctgccgtgggcctgtcgtgccagtcctgggggcgagatcggggtagaaatgcattttattctttaagttcacgtaagatacaagtttcagacagggtctgaaggactggattggccaaacatcagacctgtcttccaaggagaccaagtcctggctacatcccagcctgtggttacagtgcagacaggccatgtgagccaccgctgccagcacagagcgtccttccccctgtagactagtgccgtagggagtacctgctgccccagctgactgtggccccctccgtgatccatccatctccagggagcaagacagagacgcaggaatggaaagcggagttcctaacaggatgaaagttcccccatcagttcccccagtacctccaagcaagtagctttccacatttgtcacagaaatcagaggagagatggtgttgggagccctttggagaacgccagtctcccaggccccctgcatctatcgagtttgcaatgtcacaacctctctgatcttgtgctcagcatgattctttaatagaagttttattttttcgtgcactctgctaatcatgtgggtgagccagtggaacagcgggagacctgtgctagttttacagattgcctccttatgacgcggctcaaaaggaaaccaagtggtcaggagttgtttctgacccactgatctctactaccacaaggaaaatagtttaggagaaaccagcttttactgtttttgaaaaattacagcttcaccctgtcaagttaacaaggaatgcctgtgccaataaaaggtttctccaacttgaagtctactctgatgggatctcagatcctttgtcactgcctatagacttgtagctgctgtctctctttgtccctgcagagaatcacgtcctggaactgcatgttcttgcgactcttgggacttcatcttaacttctcgctgccccagccatgttttcaaccatggcatccctcccccaattagttccctgtcatcctcgtcaaccttctctgtaagtgcctggtaagcttgcccttgcttaagaactcaaaacatagctgtgctctatttttttgttgttgttgtgactgacagagtgagattccgtctcccaggctggagtgcagtggcgccttctcagctcactgcaacctgcagcctcctagattcaagcgattctcctgcttcagccttccgagtagctgggatgacaggcactcaccaatatgcctgggtaatttttgtatttttaagtacatacaggatttcaccatgttggccaggctagtttcaaactcccggcctcaggtggtctgcctgcctcagcctcccaaagtgttgggattacaggtgtgagccactgggccctgcctgtactttttatcagccacaaatccagcaacaagctgaggattcagctcataaaacaggtttggtgtcttggtgatctcacataaccaagatgctaccccgtggggaaccacatccccctggatgccctccagccttggtttgggctggagtcagggcctgtatacagtattttgaatttgtatgccactggtttgcattgctggtcaggaactctagtgctttgcatagccctggtttagaaacatgttatagcagttcttggtatagagcaaactagaagaaccagcaatcattccactgtcctgccaaggtacacctcagtactccccttcccaactgaagtggtatgaggctagctctttccaaaagcattcaagtttggcttctgatgtgactcagaatttaggaaccagatgctagatcaaataagctctgaaaatctgaggaacattgtaggaaaggtttgttaagcatctcttaagtgccatgatgagcataacagccggccgtggtggctcacgcctgtaatcccagcactttgggaggccaaggtgggaggatgacaag

SEQ ID NO: 1008 - DNA, 1522 bp, Homo sapiens
ccaggtgcccgcgcgggccggtgcgccgggggcgggcccggctcaggtaaaggcgcggctgggccggaggccgaggctgcgctgcacccagctccccgcgatcacatccagtcggccagggcccaggggccaggttcttctgtatacaaggagaaagtattctctctcaaacagtaaactcccttttatcacagagcaggctccaggctcaaagccctaggatctaccatacccattgactaactatggaagattataccaaaatagagaaaattggagaaggtacctatggagttgtgtataagggtagacacaaaactacaggtcaagtggtagccatgaaaaaaatcagactagaaagtgaagaggaaggggttcctagtactgcaattcgggaaatttctctattaaaggaacttcgtcatccaaatatagtcagtcttcaggatgtgcttatgcaggattccaggttatatctcatctttgagtttctttccatggatctgaagaaatacttggattctatccctcctggtcagtacatggattcttcacttgttaagagttatttataccaaatcctacaggggattgtgttttgtcactctagaagagttcttcacagagacttaaaacctcaaaatctcttgattgatgacaaaggaacaattaaactggctgattttggccttgccagagcttttggaatacctatcagagtatatacacatgaggcaataacactctggtacagatctccagaagtattgctggggtcagctcgttactcaactccagttgacatttggagtataggcaccatatttgctgaactagcaactaagaaaccacttttccatggggattcagaaattgatcaactcttcaggattttcagagctttgggcactcccaataatgaagtgtggccagaagtggaatctttacaggactataagaatacatttcccaaatggaaaccaggaagcctagcatcccatgtcaaaaacttggatgaaaatggcttggatttgctctcgaaaatgttaatctatgatccagccaaacgaatttctggcaaaatggcactgaatcatccatattttaatgatttggacaatcagattaagaagatgtagctttctgacaaaaagtttccatatgttatgtcaacagatagttgtgtttttattgttaactcttgtctatttttgtcttatatatatttctttgttatcaaacttcagctgtacttcgtcttctaatttcaaaaatataacttaaaaatgtaaatattctatatgaatttaaatataattctgtaaatgtgtgtaggtctcactgtaacaactatttgttactataataaaactataatattgatgtcaggaatcaggaaaaaatttgagttggcttaaatcatctcagtccttatggcagttttattttcctgtagttggaactactaaaatttaggtttaaatgttctcatcagtttcttgccatgttgttaactatacaa

SEQ ID NO: 1009 - DNA, 1351 bp, Homo sapiens
ccaggtgcccgcgcgggccggtgcgccgggggcgggcccggctcaggtaaaggcgcggctgggccggaggccgaggctgcgctgcacccagctccccgcgatcacatccagtcggccagggcccaggggccaggttcttctgtatacaaggagaaagtattctctctcaaacagtaaactcccttttatcacagagcaggctccaggctcaaagccctaggatctaccatacccattgactaactatggaagattataccaaaatagagaaaattggagaaggtacctatggagttgtgtataagggtagacacaaaactacaggtcaagtggtagccatgaaaaaaatcagactagaaagtgaagaggaaggggttcctagtactgcaattcgggaaatttctctattaaaggaacttcgtcatccaaatatagtcagtcttcaggatgtgcttatgcaggattccaggttatatctcatctttgagtttctttccatggatctgaagaaatacttggattctatccctcctggtcagtacatggattcttcacttgttaaggtagtaacactctggtacagatctccagaagtattgctggggtcagctcgttactcaactccagttgacatttggagtataggcaccatatttgctgaactagcaactaagaaaccacttttccatggggattcagaaattgatcaactcttcaggattttcagagctttgggcactcccaataatgaagtgtggccagaagtggaatctttacaggactataagaatacatttcccaaatggaaaccaggaagcctagcatcccatgtcaaaaacttggatgaaaatggcttggatttgctctcgaaaatgttaatctatgatccagccaaacgaatttctggcaaaatggcactgaatcatccatattttaatgatttggacaatcagattaagaagatgtagctttctgacaaaaagtttccatatgttatgtcaacagatagttgtgtttttattgttaactcttgtctatttttgtcttatatatatttctttgttatcaaacttcagctgtacttcgtcttctaatttcaaaaatataacttaaaaatgtaaatattctatatgaatttaaatataattctgtaaatgtgtgtaggtctcactgtaacaactatttgttactataataaaactataatattgatgtcaggaatcaggaaaaaatttgagttggcttaaatcatctcagtccttatggcagttttattttcctgtagttggaactactaaaatttaggtttaaatgttctcatcagtttcttgccatgttgttaactatacaa

SEQ ID NO: 1010 - DNA, 1852 bp, Homo sapiens
ccaggtgcccgcgcgggccggtgcgccgggggcgggcccggctcaggtaaaggcgcggctgggccggaggccgaggctgcgctgcacccagctccccgcgatcacatccagtcggccagggcccaggggccaggttcttctgtatacaaggagaaagtattctctctcaaacagtaaactcccttttatcacagagcaggctccaggctcaaagccctaggatctaccatacccattgactaactatggaagattataccaaaatagagaaaattggagaaggtacctatggagttgtgtataagggtagacacaaaactacaggtcaagtggtagccatgaaaaaaatcagactagaaagtgaagaggaaggggttcctagtactgcaattcgggaaatttctctattaaaggaacttcgtcatccaaatatagtcagtcttcaggatgtgcttatgcaggattccaggttatatctcatctttgagtttctttccatggatctgaagaaatacttggattctatccctcctggtcagtacatggattcttcacttgttaagagttatttataccaaatcctacaggggattgtgttttgtcactctagaagagttcttcacagagacttaaaacctcaaaatctcttgattgatgacaaaggaacaattaaactggctgattttggccttgccagagcttttggaatacctatcagagtatatacacatgaggcaaagctttgggcactcccaataatgaagtgtggccagaagtggaatctttacaggactataagaatacatttcccaaatggaaaccaggaagcctagcatcccatgtcaaaaacttggatgaaaatggcttggatttgctctcgaaaatgttaatctatgatccagccaaacgaatttctggcaaaatggcactgaatcatccatattttaatgatttggacaatcagattaagaagatgtagctttctgacaaaaagtttccatatgttatgtcaacagatagttgtgtttttattgttaactcttgtctatttttgtcttatatatatttctttgttatcaaacttcagctgtacttcgtcttctaatttcaaaaatataacttaaaaatgtaaatattctatatgaatttaaatataattctgtaaatgtgtgtaggtctcactgtaacaactatttgttactataataaaactataatattgatgtcaggaatcaggaaaaaatttgagttggcttaaatcatctcagtccttatggcagttttattttcctgtagttggaactactaaaatttaggaaaatgctaagttcaagtttcgtaatgctttgaagtatttttatgctctgaatgtttaaatgttctcatcagtttcttgccatgttgttaactatacaacctggctaaagatgaatatttttctactggtattttaatttttgacctaaatgtttaagcattcggaatgagaaaactatacagatttgagaaatgatgctaaatttataggagttttcagtaacttaaaaagctaacatgagagcatgccaaaatttgctaagtcttacaaagatcaagggctgtccgcaacagggaagaacagttttgaaaatttatgaactatcttatttttaggtaggttttgaaagctttttgtctaagtgaattcttatgccttggtcagagtaataactgaaggaggtgcttatcttggctttcgagtctgagtttaaaactacacattttgacatagtgtttattagcagccatctaaaaaggctctaatgtatatttaactaaaattactagctttgggaattaaactgtttaacaa

SEQ ID NO: 1011 - DNA, 1841 bp, Homo sapiens
ccaggtgcccgcgcgggccggtgcgccgggggcgggcccggctcaggtaaaggcgcggctgggccggaggccgaggctgcgctgcacccagctccccgcgatcacatccagtcggccagggcccaggggccaggttcttctgtatacaaggagaaagtattctctctcaaacagtaaactcccttttatcacagagcaggctccaggctcaaagccctaggatctaccatacccattgactaactatggaagattataccaaaatagagaaaattggagaaggtacctatggagttgtgtataagggtagacacaaaactacaggtcaagtggtagccatgaaaaaaatcagactagaaagtgaagaggaaggggttcctagtactgcaattcgggaaatttctctattaaaggaacttcgtcatccaaatatagtcagtcttcaggatgtgcttatgcaggattccaggttatatctcatctttgagtttctttccatggatctgaagaaatacttggattctatccctcctggtcagtacatggattcttcacttgttaaggtagtaacactctggtacagatctccagaagtattgctggggtcagctcgttactcaactccagttgacatttggagtataggcaccatatttgctgaactagcaactaagaaaccacttttccatggggattcagaaattgatcaactcttcaggattttcagagctttgggcactcccaataatgaagtgtggccagaagtggaatctttacaggactataagaatacatttcccaaatggaaaccaggaagcctagcatcccatgtcaaaaacttggatgaaaatggcttggatttgctctcgaaaatgttaatctatgatccagccaaacgaatttctggcaaaatggcactgaatcatccatattttaatgatttggacaatcagattaagaagatgtagctttctgacaaaaagtttccatatgttatgtcaacagatagttgtgtttttattgttaactcttgtctatttttgtcttatatatatttctttgttatcaaacttcagctgtacttcgtcttctaatttcaaaaatataacttaaaaatgtaaatattctatatgaatttaaatataattctgtaaatgtgtgtaggtctcactgtaacaactatttgttactataataaaactataatattgatgtcaggaatcaggaaaaaatttgagttggcttaaatcatctcagtccttatggcagttttattttcctgtagttggaactactaaaatttaggaaaatgctaagttcaagtttcgtaatgctttgaagtatttttatgctctgaatgtttaaatgttctcatcagtttcttgccatgttgttaactatacaacctggctaaagatgaatatttttctactggtattttaatttttgacctaaatgtttaagcattcggaatgagaaaactatacagatttgagaaatgatgctaaatttataggagttttcagtaacttaaaaagctaacatgagagcatgccaaaatttgctaagtcttacaaagatcaagggctgtccgcaacagggaagaacagttttgaaaatttatgaactatcttatttttaggtaggttttgaaagctttttgtctaagtgaattcttatgccttggtcagagtaataactgaaggaggtgcttatcttggctttcgagtctgagtttaaaactacacattttgacatagtgtttattagcagccatctaaaaaggctctaatgtatatttaactaaaattactagctttgggaattaaactgtttaacaa

SEQ ID NO: 1012 - DNA, 2012 bp, Homo sapiens
ccaggtgcccgcgcgggccggtgcgccgggggcgggcccggctcaggtaaaggcgcggctgggccggaggccgaggctgcgctgcacccagctccccgcgatcacatccagtcggccagggcccaggggccaggttcttctgtatacaaggagaaagtattctctctcaaacagtaaactcccttttatcacagagcaggctccaggctcaaagccctaggatctaccatacccattgactaactatggaagattataccaaaatagagaaaattggagaaggtacctatggagttgtgtataagggtagacacaaaactacaggtcaagtggtagccatgaaaaaaatcagactagaaagtgaagaggaaggggttcctagtactgcaattcgggaaatttctctattaaaggaacttcgtcatccaaatatagtcagtcttcaggatgtgcttatgcaggattccaggttatatctcatctttgagtttctttccatggatctgaagaaatacttggattctatccctcctggtcagtacatggattcttcacttgttaagagttatttataccaaatcctacaggggattgtgttttgtcactctagaagagttcttcacagagacttaaaacctcaaaatctcttgattgatgacaaaggaacaattaaactggctgattttggccttgccagagcttttggaatacctatcagagtatatacacatgaggcaataacactctggtacagatctccagaagtattgctggggtcagctcgttactcaactccagttgacatttggagtataggcaccatatttgctgaactagcaactaagaaaccacttttccatggggattcagaaattgatcaactcttcaggattttcagagctttgggcactcccaataatgaagtgtggccagaagtggaatctttacaggactataagaatacatttcccaaatggaaaccaggaagcctagcatcccatgtcaaaaacttggatgaaaatggcttggatttgctctcgaaaatgttaatctatgatccagccaaacgaatttctggcaaaatggcactgaatcatccatattttaatgatttggacaatcagattaagaagatgtagctttctgacaaaaagtttccatatgttatgtcaacagatagttgtgtttttattgttaactcttgtctatttttgtcttatatatatttctttgttatcaaacttcagctgtacttcgtcttctaatttcaaaaatataacttaaaaatgtaaatattctatatgaatttaaatataattctgtaaatgtgtgtaggtctcactgtaacaactatttgttactataataaaactataatattgatgtcaggaatcaggaaaaaatttgagttggcttaaatcatctcagtccttatggcagttttattttcctgtagttggaactactaaaatttaggaaaatgctaagttcaagtttcgtaatgctttgaagtatttttatgctctgaatgtttaaatgttctcatcagtttcttgccatgttgttaactatacaacctggctaaagatgaatatttttctactggtattttaatttttgacctaaatgtttaagcattcggaatgagaaaactatacagatttgagaaatgatgctaaatttataggagttttcagtaacttaaaaagctaacatgagagcatgccaaaatttgctaagtcttacaaagatcaagggctgtccgcaacagggaagaacagttttgaaaatttatgaactatcttatttttaggtaggttttgaaagctttttgtctaagtgaattcttatgccttggtcagagtaataactgaaggaggtgcttatcttggctttcgagtctgagtttaaaactacacattttgacatagtgtttattagcagccatctaaaaaggctctaatgtatatttaactaaaattactagctttgggaattaaactgtttaacaa

SEQ ID NO: 1013 - DNA, 4839 bp, Homo sapiens
ggaggcggcgggaggcgggcggaggaggaggcggaggaggcgggagctgagctgagtggggcgggcggcggcggggcccgagccggagaagatggcggtgcggaagaaggacggcggccccaacgtgaagtactacgaggccgcggacaccgtgacccagttcgacaacgtgcggctgtggctcggcaagaactacaagaagtatatacaagctgaaccacccaccaacaagtccctgtctagcctggttgtacagttgctacaatttcaggaagaagtttttggcaaacatgtcagcaatgcaccgctcactaaactgccgatcaaatgtttcctagatttcaaagcgggaggctccttgtgccacattcttgcagctgcctacaaattcaagagtgaccagggatggcggcgttacgatttccagaatccatcacgcatggaccgcaatgtggaaatgtttatgaccattgagaagtccttggtgcagaataattgcctgtctcgacctaacatttttctgtgcccagaaattgagcccaaactactagggaaattaaaggacattatcaagagacaccagggaacagtcactgaggataagaacaatgcctcccatgttgtgtatcctgtcccggggaatctagaagaagaggaatgggtacgaccagtcatgaagagggataagcaggttcttctgcactggggctactatcctgacagttacgacacgtggatcccagcgagtgaaattgaggcatctgtggaagatgctccaactcctgagaaacctaggaaggttcatgcaaagtggatcctggacaccgacaccttcaatgaatggatgaatgaggaagactatgaagtaaatgatgacaaaaaccctgtctcccgccgaaagaagatttcagccaagacactgacagatgaggtgaacagcccagattcagatcgacgggacaagaaggggggaaactataagaagaggaagcgctccccctctccttcaccaaccccagaagcaaagaagaaaaatgctaagaaaggtccctcaacaccttacactaagtcaaagcgtggccacagagaagaggagcaagaagacctgacaaaggacatggacgagccctcaccagtccccaatgtagaagaggtgacacttcccaaaacagtcaacacaaagaaagactcagagtcggccccagtcaaaggcggcaccatgaccgacctggatgaacaggaagatgaaagcatggagacgacgggcaaggatgaggatgagaacagtacggggaacaagggagagcagaccaagaatccagacctgcatgaggacaatgtgactgaacagacccaccacatcatcattcccagctacgctgcctggtttgactacaatagtgttcatgccattgagcggagggctctccccgagttcttcaacggcaagaacaagtccaagactccagagatctacctggcctatcgaaactttatgattgacacttaccgactgaacccccaagagtatcttacctctaccgcctgccgccgaaacctagcgggtgatgtctgtgccatcatgagggtccatgccttcctagaacagtggggtcttattaactaccaggtggatgctgagagtcgaccaaccccaatggggcctccgcctacctctcacttccatgtcttggctgacacaccatcagggctggtgcctctgcagcccaagacacctcagcagacctctgcttcccaacaaatgctcaactttcctgacaaaggcaaagagaaaccaacagacatgcaaaactttgggctgcgcacagacatgtacacaaaaaagaatgttccctccaagagcaaggctgcagccagtgccactcgtgagtggacagaacaggaaaccctgcttctcctggaggcactggaaatgtacaaagatgactggaacaaagtgtccgagcatgtgggaagccgcacacaggacgagtgcatcttgcattttcttcgtcttcccattgaagacccatacctggaggactcagaggcctccctaggccccctggcctaccaacccatccccttcagtcagtcgggcaaccctgttatgagcactgttgccttcctggcctctgtcgtcgatccccgagtcgcctctgctgctgcaaagtcagccctagaggagttctccaaaatgaaggaagaggtacccacggccttggtggaggcccatgttcgaaaagtggaagaagcagccaaagtaacaggcaaggcggaccctgccttcggtctggaaagcagtggcattgcaggaaccacctctgatgagcctgagcggattgaggagagcgggaatgacgaggctcgggtggaaggccaggccacagatgagaagaaggagcccaaggaaccccgagaaggagggggtgctatagaggaggaagcaaaagagaaaaccagcgaggctcccaagaaggatgaggagaaagggaaagaaggcgacagtgagaaggagtccgagaagagtgatggagacccaatagtcgatcctgagaaggagaaggagccaaaggaagggcaggaggaagtgctgaaggaagtggtggagtctgagggggaaaggaagacaaaggtggagcgggacattggcgagggcaacctctccaccgctgctgccgccgccctggccgccgccgcagtgaaagctaagcacttggctgctgttgaggaaaggaagatcaaatctttggtggccctgctggtggagacccagatgaaaaagttggagatcaaacttcggcactttgaggagctggagactatcatggaccgggagcgagaagcactggagtatcagaggcagcagctcctggccgacagacaagccttccacatggagcagctgaagtatgcggagatgagggctcggcagcagcacttccaacagatgcaccaacagcagcagcagccaccaccagccctgcccccaggctcccagcctatccccccaacaggggctgctgggccacccgcagtccatggcttggctgtggctccagcctctgtagtccctgctcctgctggcagtggggcccctccaggaagtttgggcccttctgaacagattgggcaggcagggtcaactgcagggccacagcagcagcaaccagctggagccccccagcctggggcagtcccaccaggggttcccccccctggaccccatggcccctcaccgttccccaaccaacaaactcctccctcaatgatgccaggggcagtgccaggcagcgggcacccaggcgtggcgggtaatgctcctttgggtttgccttttggcatgccgcctcctcctcctcctcctgctccatccatcatcccatttggtagtctagctgactccatcagtattaacctccccgctcctcctaacctgcatgggcatcaccaccatctcccgttcgccccgggcactctccccccacctaacctgcctgtgtccatggcgaaccctctacatcctaacctgccggcgaccaccaccatgccatcttccttgcctctcgggccggggctcggatccgccgcagcccaaagccctgccattgtggcagctgttcagggcaacctcctgcccagtgccagcccactgccagacccaggcacccccctgcctccagaccccacagccccgagcccaggcacggtcacccctgtgccacctccacagtgaggagccagccagacatctctccccctcaccccctgtggacatcacggttccaggaacagcccttcccccaccactgggaccctccccagcctggagagttcatcactacgtaaggaaagctccttccgcccctccaaagccctcaccatgcctaacagaggcatgcatttttatatcagattattcaaggacttctgtttaaaagatgtttataatgtctgggagagaggataggatgggaatgctgccctaaaggaagggctggtgaaaggtgtttatacaaggttctattaaccacttctaagggtacacctccctccaaactactgcattttctatggattaaaaaaaaaaaaaaaaagtagattttaaaaagccacattggagctcccttctacccactaaaaaataaccaatttttacattttttgagggggagtgagttttaggaaaggggaattaagattccagggagagctctggggatagaacagggcgcagattccatctctccccaagcccctttttagtgactaagtcaaggccccaactcccctcccccaccctacgctgagcttattcgagttcattcgtactaataatccctcctgcggcttcctcattgttgctgttttaggccaccccagctcagccaatgattcctttccctctgaatgtcagttttgtttttaaaagtcacttgcttagttgatgtcagcgtatgtgtatttggtggggaaaacctaatttcggggatttctgtggtaggtaataggagaagaaagggcactgggggctgttctccttccttccctgggctgtatccatggactcctggaaggcacagagaagggagctataagaggatgtgaagttttaaaacctgaaattgttttttaaagcacttaagcacctccatattatgggaaggcaggtgtgactccaggctctgcactggttcttcttggttcctcccaccaggccctttgttcctcatgtccccatgtttctctccctctgcgtcttagcacctttcttctgttcaaagttttctgtaaattttctctttttttctttctttcttttttttttttttataaatt

SEQ ID NO: 1014 - DNA, 5750 bp, Homo sapiens
gctgggcggggccgggaagcggcagtggcggctacgcgcgcgggggtgcgcgcgggaacgaccgggaaacaccgcgagggccggggtgggccaggctgtggggacgacgggctgcgacgatggccgcagcggcgggcggcggcgggccggggacagcggtaggcgccacgggctcggggattgcggcggcagccgcaggcctagctgtttatcgacggaaggatgggggcccggccaccaagttttgggagagcccggagacggtgtcccagctggattcggtgcgggtctggctgggcaagcactacaagaagtatgttcatgcggatgctcctaccaataaaacactggctgggctggtggtgcagcttcttcagttccaggaagatgcctttgggaagcatgtcaccaacccggccttcaccaaactccctgcaaagtgtttcatggatttcaaagctggaggcgccttatgtcacattcttggggctgcttacaagtataaaaatgaacagggatggcggaggtttgacctacagaacccatctcgaatggatcgtaatgtggaaatgtttatgaacattgaaaaaacattggtgcagaacaattgtttgaccagacccaacatctacctcattccagacattgatctgaagttggctaacaaattgaaagatatcatcaaacgacatcagggaacatttacggatgagaagtcaaaagcttcccaccacatttacccatattcttcctcacaagacgatgaagaatggttgagaccggtgatgagaaaagagaagcaagtgttagtgcattggggcttttacccagacagctatgatacttgggtccatagtaatgatgttgatgctgaaattgaagatccaccaattccagaaaaaccatggaaggttcatgtgaaatggattttggacactgatattttcaatgaatggatgaatgaggaggattatgaggtggatgaaaataggaagcctgtgagttttcgtcagcggatttcaaccaagaatgaagagccagtcagaagtccagaaagaagagatagaaaagcatcagctaatgctcgaaagaggaaacattcgccttcgcctccccctccgacaccaacagaatcacggaagaagagtgggaagaaaggccaagctagcctttatgggaagcgcagaagtcagaaagaggaagatgagcaagaagatctaaccaaggatatggaagacccaacacctgtacccaatatagaagaagtagtacttcccaaaaatgtgaacctaaagaaagatagtgaaaatacacctgttaaaggaggaactgtagcggatctagatgagcaggatgaagaaacagtcacagcaggaggaaaggaagatgaagatcctgccaaaggtgatcagagtcgatcagttgaccttggggaagataatgtgacagagcagaccaatcacattattattcctagttatgcatcatggtttgattataactgtattcatgtgattgaacggcgtgctcttcctgagttcttcaatggaaaaaacaaatccaagactccagaaatatacttggcatatcgaaattttatgattgacacgtatcgtctaaacccccaagagtatttaactagcactgcttgtcggaggaacttgactggagatgtgtgtgctgtgatgagggtccatgccgggggagagcagtggggactcgttaattaccaagttgacccggaaagtagacccatggcaatgggacctcctcctactcctcattttaatgtattagctgataccccctctgggcttgtgcctctgcatcttcgatcacctcaggttcctgctgctcaacagatgctaaattttcctgagaaaaacaaggaaaaaccagttgatttgcagaactttggtctccgtactgacatttactccaagaaaacattagcaaagagtaaaggtgctagtgctggaagagaatggactgaacaggagacccttctactcctggaggccctggagatgtacaaggatgattggaacaaagtgtcggaacatgttggaagtcgtactcaggatgaatgcatcctccactttttgagacttcccattgaggacccataccttgagaattcagatgcttcccttgggcctttggcctaccagcctgtccccttcagtcagtcaggaaatccagttatgagtactgttgcttttttggcatctgtggtggaccctcgcgtggcatctgctgcagcaaaagcggctttggaggagttttctcgggtccgggaggaggtaccactggaattggttgaagctcatgtcaagaaagtacaagaagcagcacgagcctctgggaaagtggatcccacctacggtctggagagcagctgcattgcaggcacagggcccgatgagccagagaagcttgaaggagctgaagaggaaaaaatggaagccgaccctgatggtcagcagcctgaaaaggcagaaaataaagtggaaaatgaaacggatgaaggtgataaagcacaagatggagaaaatgaaaaaaatagtgaaaaggaacaggatagtgaagtgagtgaggataccaaatcagaagaaaaggagactgaagagaacaaagaactcactgatacatgtaaagaaagagaaagtgatactgggaagaagaaagtagaacatgaaatttccgaaggaaatgttgccacagccgcagcagctgctcttgcctcagcggctaccaaagccaagcacctggctgcagtggaagaaagaaagatcaagtccctggtagctctcttggttgagacacaaatgaagaaactagagatcaaacttcgacattttgaagagctggaaactatcatggacagagagaaagaagctctagaacaacagaggcagcagttgcttactgaacgccaaaacttccacatggaacagctgaagtatgctgaattacgagcacgacagcaaatggaacagcagcagcatggccagaaccctcaacaggcacaccagcactcaggaggacctggcctggccccacttggagcagcagggcaccctggcatgatgcctcatcaacagccccctccctaccctctgatgcaccaccagatgccaccacctcatccaccccagccaggtcagataccaggcccaggttccatgatgcccgggcagcacatgccaggccgcatgattcccactgttgcagccaacatccacccctctgggagtggccctacccctcctggcatgccaccaatgccaggaaacatcttaggaccccgggtacccctgacagcacctaacggcatgtatccccctccaccacagcagcagccaccgccaccaccacctgcagatggggtccctccgcctcctgctcctggcccgccagcctcagctgctccttagcctggaagatgcagggaacctccacgcccaccaccatgagctggagtggggatgacaagacttgtgttcctcaactttcttgggtttctttcaggatttttcttctcacagctccaagcacgtgtcccgtgcctccccactcctcttaccacccctctctctgacactttttgtgttgggtcctcagccaacactcaaggggaaacctgtagtgacagtgtgccctggtcatccttaaaataacctgcatctcccctgtcctggtgtgggagtaagctgacagtttctctgcaggtcctgtcaactttagcatgctatgtctttaccatttttgctctcttgcagttttttgctttgtcttatgcttctatggataatgctatataatcattatctttttatctttctgttattattgttttaaaggagagcatcctaagttaataggaaccaaaaaataatgatgggcagaagggggggaatagccacaggggacaaaccttaaggcattataagtgaccttatttctgcttttctgagctaagaatggtgctgatggtaaagtttgagacttttgccacacacaaatttgtgaaaattaaacgagatgtggaaggagaacctcagtgattttattccctagtgaggcctctgagggcctccacactgcctggcagaacataccactgaactagtatgtgctagaggagggcacaaacatccgctccttccctaggcctgctggctctggttttctatgcagatgattcattggattgggggtgagtgttttgtttttctgggggcagtgtgagctttgagggttggaatattgggaggcattccttagtttcctcaactagcctggaaagttaggagtctagggtaattaccccccaatgagtctagcctactattcactgctttgtgtgcatttttttctccctctttaaaaaaccctttaaaagaaaaaaaaaagtagatagtgctaaatattttagctcatgaaacttggttaggatggctgggggtacaagtccccaaactacctcttgttacagtagccagggagtggaatttcgtcaaccggtacttttaaggttaggatgggacgggaaaagtgaagcaggatattagctccttataccttctcccttccatttctgagatctcacattccatctatcacagggttttcaaagagatgctgagggtaacaaggaactcacttggcagtcagagcatcatgctttgaggtttggggtgctcaggctgggagggtagaatgccattccagaggacaagccacaaaaatgccttaatttgagctcgtatttacccctgctgataagtgacttgagagttcccggttttttcctcttgtccttccctcccttctgtccttccatgtgtggggaaagggtgtttttggtagagcttggtttccaaagcgcctggctttctcacttcacattctcaagtggcagtttcattatttagaatgcaaggtggacatcttttggatatctttttctatatattttctaaagctttacatatgagagggtatagggaggtgtttataaaacacttgagaacttttttccttaatatcagaaagcaaaaaaataaaaccacaattgagatttgcctttcaaaccctcaggtttgcctctaaccaggtgtccctggtcaccatcagagtactggaatacgggaaccgaggagaccttggtccttttgtttttgttctggactcttgggagtggaaatgagaatgagtttattctcactggagcttagttccaatgcatttggctccagaaagaccccagtgccttttgacaatggccagggttttacctacttcctgccagtctttcccaaaggaaactcattccaaatacttcttttttcccctggagtccgagaaggaaaatggaattctggttcatactgtggtcccttgtaacctcaggtctttaatgtgatcactttcaaatttaaaagatccaggtggaaatatttttactatagtaataattctacaaaatacctgaattcttaacactgttatatttcagtataagtggtggctttttcttttcatgtctttgatctggttttattcctgtaattcagccacctgattttgtgaggggggggaataatatgtggtttttgtacaaacatgtttctcagtgtgttgttattttggaaaaaatgaggggagggagtttggcaagaatggagaaaatgaatgaagaaggcctaatctctctctttttcagtgaataaatggaacaccatttc

SEQ ID NO: 1015 - DNA, 6144 bp, Homo sapiens
gctgggcggggccgggaagcggcagtggcggctacgcgcgcgggggtgcgcgcgggaacgaccgggaaacaccgcgagggccggggtgggccaggctgtggggacgacgggctgcgacgatggccgcagcggcgggcggcggcgggccggggacagcggtaggcgccacgggctcggggattgcggcggcagccgcaggcctagctgtttatcgacggaaggatgggggcccggccaccaagttttgggagagcccggagacggtgtcccagctggattcggtgcgggtctggctgggcaagcactacaagaagtatgttcatgcggatgctcctaccaataaaacactggctgggctggtggtgcagcttcttcagttccaggaagatgcctttgggaagcatgtcaccaacccggccttcaccaaactccctgcaaagtgtttcatggatttcaaagctggaggcgccttatgtcacattcttggggctgcttacaagtataaaaatgaacagggatggcggaggtttgacctacagaacccatctcgaatggatcgtaatgtggaaatgtttatgaacattgaaaaaacattggtgcagaacaattgtttgaccagacccaacatctacctcattccagacattgatctgaagttggctaacaaattgaaagatatcatcaaacgacatcagaagaatggttgagaccggtgatgagaaaagagaagcaagtgttagtgcattggggcttttacccagacagctatgatacttgggtccatagtaatgatgttgatgctgaaattgaagatccaccaattccagaaaaaccatggaaggttcatgtgaaatggattttggacactgatattttcaatgaatggatgaatgaggaggattatgaggtggatgaaaataggaagcctgtgagttttcgtcagcggatttcaaccaagaatgaagagccagtcagaagtccagaaagaagagatagaaaagcatcagctaatgctcgaaagaggaaacattcgccttcgcctccccctccgacaccaacagaatcacggaagaagagtgggaagaaaggccaagctagcctttatgggaagcgcagaagtcagaaagaggaagatgagcaagaagatctaaccaaggatatggaagacccaacacctgtacccaatatagaagaagtagtacttcccaaaaatgtgaacctaaagaaagatagtgaaaatacacctgttaaaggaggaactgtagcggatctagatgagcaggatgaagaaacagtcacagcaggaggaaaggaagatgaagatcctgccaaaggtgatcagagtcgatcagttgaccttggggaagataatgtgacagagcagaccaatcacattattattcctagttatgcatcatggtttgattataactgtattcatgtgattgaacggcgtgctcttcctgagttcttcaatggaaaaaacaaatccaagactccagaaatatacttggcatatcgaaattttatgattgacacgtatcgtctaaacccccaagagtatttaactagcactgcttgtcggaggaacttgactggagatgtgtgtgctgtgatgagggtccatgcctttttagagcagtggggactcgttaattaccaagttgacccggaaagtagacccatggcaatgggacctcctcctactcctcattttaatgtattagctgataccccctctgggcttgtgcctctgcatcttcgatcacctcaggttcctgctgctcaacagatgctaaattttcctgagaaaaacaaggaaaaaccagttgatttgcagaactttggtctccgtactgacatttactccaagaaaacattagcaaagagtaaaggtgctagtgctggaagagaatggactgaacaggagacccttctactcctggaggccctggagatgtacaaggatgattggaacaaagtgtcggaacatgttggaagtcgtactcaggatgaatgcatcctccactttttgagacttcccattgaggacccataccttgagaattcagatgcttcccttgggcctttggcctaccagcctgtccccttcagtcagtcaggaaatccagttatgagtactgttgcttttttggcatctgtggtggaccctcgcgtggcatctgctgcagcaaaagcggctttggaggagttttctcgggtccgggaggaggtaccactggaattggttgaagctcatgtcaagaaagtacaagaagcagcacgagcctctgggaaagtggatcccacctacggtctggagagcagctgcattgcaggcacagggcccgatgagccagagaagcttgaaggagctgaagaggaaaaaatggaagccgaccctgatggtcagcagcctgaaaaggcagaaaataaagtggaaaatgaaacggatgaaggtgataaagcacaagatggagaaaatgaaaaaaatagtgaaaaggaacaggatagtgaagtgagtgaggataccaaatcagaagaaaaggagactgaagagaacaaagaactcactgatacatgtaaagaaagagaaagtgatactgggaagaagaaagtagaacatgaaatttccgaaggaaatgttgccacagccgcagcagctgctcttgcctcagcggctaccaaagccaagcacctggctgcagtggaagaaagaaagatcaagtccctggtagctctcttggttgagacacaaatgaagaaactagagatcaaacttcgacattttgaagagctggaaactatcatggacagagagaaagaagctctagaacaacagaggcagcagttgcttactgaacgccaaaacttccacatggaacagctgaagtatgctgaattacgagcacgacagcaaatggaacagcagcagcatggccagaaccctcaacaggcacaccagcactcaggaggacctggcctggccccacttggagcagcagggcaccctggcatgatgcctcatcaacagccccctccctaccctctgatgcaccaccagatgccaccacctcatccaccccagccaggtcagataccaggcccaggttccatgatgcccgggcagcacatgccaggccgcatgattcccactgttgcagccaacatccacccctctgggagtggccctacccctcctggcatgccaccaatgccaggaaacatcttaggaccccgggtacccctgacagcacctaacggcatgtatccccctccaccacagcagcagccaccgccaccaccacctgcagatggggtccctccgcctcctgctcctggcccgccagcctcagctgctccttagcctggaagatgcagggaacctccacgcccaccaccatgagctggagtggggatgacaagacttgtgttcctcaactttcttgggtttctttcaggatttttcttctcacagctccaagcacgtgtcccgtgcctccccactcctcttaccacccctctctctgacactttttgtgttgggtcctcagccaacactcaaggggaaacctgtagtgacagtgtgccctggtcatccttaaaataacctgcatctcccctgtcctggtgtgggagtaagctgacagtttctctgcaggtcctgtcaactttagcatgctatgtctttaccatttttgctctcttgcagttttttgctttgtcttatgcttctatggataatgctatataatcattatctttttatctttctgttattattgttttaaaggagagcatcctaagttaataggaaccaaaaaataatgatgggcagaagggggggaatagccacaggggacaaaccttaaggcattataagtgaccttatttctgcttttctgagctaagaatggtgctgatggtaaagtttgagacttttgccacacacaaatttgtgaaaattaaacgagatgtggaaggagaacctcagtgattttattccctagtgaggcctctgagggcctccacactgcctggcagaacataccactgaactagtatgtgctagaggagggcacaaacatccgctccttccctaggcctgctggctctggttttctatgcagatgattcattggattgggggtgagtgttttgtttttctgggggcagtgtgagctttgagggttggaatattgggaggcattccttagtttcctcaactagcctggaaagttaggagtctagggtaattaccccccaatgagtctagcctactattcactgctttgtgtgcatttttttctccctctttaaaaaaccctttaaaagaaaaaaaaaagtagatagtgctaaatattttagctcatgaaacttggttaggatggctgggggtacaagtccccaaactacctcttgttacagtagccagggagtggaatttcgtcaaccggtacttttaaggttaggatgggacgggaaaagtgaagcaggatattagctccttataccttctcccttccatttctgagatctcacattccatctatcacagggttttcaaagagatgctgagggtaacaaggaactcacttggcagtcagagcatcatgctttgaggtttggggtgctcaggctgggagggtagaatgccattccagaggacaagccacaaaaatgccttaatttgagctcgtatttacccctgctgataagtgacttgagagttcccggttttttcctcttgtccttccctcccttctgtccttccatgtgtggggaaagggtgtttttggtagagcttggtttccaaagcgcctggctttctcacttcacattctcaagtggcagtttcattatttagaatgcaaggtggacatcttttggatatctttttctatatattttctaaagctttacatatgagagggtatagggaggtgtttataaaacacttgagaacttttttccttaatatcagaaagcaaaaaaataaaaccacaattgagatttgcctttcaaaccctcaggtttgcctctaaccaggtgtccctggtcaccatcagagtactggaatacgggaaccgaggagaccttggtccttttgtttttgttctggactcttgggagtggaaatgagaatgagtttattcctactggagcttagttccaatgcatttggctccagaaagaccccagtgccttttgacaatggccagggttttacctacttcctgccagtctttcccaaaggaaactcattccaaatacttcttttttcccctggagtccgagaaggaaaatggaattctggttcatactgtggtcccttgtaacctcaggtctttaatgtgatcactttcaaatttaaaagatccaggtggaaatatttttactatagtaataattctacaaaatacctgaattcttaacactgttatatttcagtataagtggtggctttttcttttcatgtctttgatctggttttattcctgtaattcagccacctgattttgtgaggggggggaataatatgtggtttttgtacaaacatgtttctcagtgtgttgttattttggaaaaaatgaggggagggagtttggcaagaatggagaaaatgaatgaagaaggcctaatctctctctttttcagtgaataaatggaacaccatttctggattctagtcccattctctgcattcatacaccagtttcttcatatatcctatgaagaacctaaacatttggccccacctggtcttggtttgatcagcagttaaaattctgtgactcgggcttccttcccgactgcccaccttcatgatgtgtaaggaacatacattttgagggtacctcacccactgttcatttgcatggtcaaagtgaaaatgagtggaagttctccaaaaatgatggccaacatcctggcacctccaggtgtgagaaatagctttgcttggtgaatgggataatgtttgtcaggatgcagtttagacagtcccaagttggaggcaggccttgagggcagaagattctgtgaaccttgggggacagcttttgggtactcacagatataaaccctgtgcagaaaaaaagaagtgattgttttcaggatgcttataaatcgagtgaagcaaaa

SEQ ID NO: 1016 - DNA, 5391 bp, Homo sapiens
agacaaggtcttgctctgttacccaggctgcagtgcagtggcatgaagacagctcaagtgatcctccaacctcagcctccctgggggctggcactacgggcacgtgccacccatagctatgatacttgggtccatagtaatgatgttgatgctgaaattgaagatccaccaattccagaaaaaccatggaaggttcatgtgaaatggattttggacactgatattttcaatgaatggatgaatgaggaggattatgaggtggatgaaaataggaagcctgtgagttttcgtcagcggatttcaaccaagaatgaagagccagtcagaagtccagaaagaagagatagaaaagcatcagctaatgctcgaaagaggaaacattcgccttcgcctccccctccgacaccaacagaatcacggaagaagagtgggaagaaaggccaagctagcctttatgggaatgaacctaaagaaagatagtgaaaatacacctgttaaaggaggaactgtagcggatctagatgagcaggatgaagaaacagtcacagcaggaggaaaggaagatgaagatcctgccaaaggtgatcagagtcgatcagttgaccttggggaagataatgtgacagagcagaccaatcacattattattcctagttatgcatcatggtttgattataactgtattcatgtgattgaacggcgtgctcttcctgagttcttcaatggaaaaaacaaatccaagactccagaaatatacttggcatatcgaaattttatgattgacacgtatcgtctaaacccccaagagtatttaactagcactgcttgtcggaggaacttgactggagatgtgtgtgctgtgatgagggtccatgcctttttagagcagtggggactcgttaattaccaagttgacccggaaagtagacccatggcaatgggacctcctcctactcctcattttaatgtattagctgataccccctctgggcttgtgcctctgcatcttcgatcacctcaggttcctgctgctcaacagatgctaaattttcctgagaaaaacaaggaaaaaccagttgatttgcagaactttggtctccgtactgacatttactccaagaaaacattagcaaagagtaaaggtgctagtgctggaagagaatggactgaacaggagacccttctactcctggaggccctggagatgtacaaggatgattggaacaaagtgtcggaacatgttggaagtcgtactcaggatgaatgcatcctccactttttgagacttcccattgaggacccataccttgagaattcagatgcttcccttgggcctttggcctaccagcctgtccccttcagtcagtcaggaaatccagttatgagtactgttgcttttttggcatctgtggtggaccctcgcgtggcatctgctgcagcaaaagcggctttggaggagttttctcgggtccgggaggaggtaccactggaattggttgaagctcatgtcaagaaagtacaagaagcagcacgagcctctgggaaagtggatcccacctacggtctggagagcagctgcattgcaggcacagggcccgatgagccagagaagcttgaaggagctgaagaggaaaaaatggaagccgaccctgatggtcagcagcctgaaaaggcagaaaataaagtggaaaatgaaacggatgaaggtgataaagcacaagatggagaaaatgaaaaaaatagtgaaaaggaacaggatagtgaagtgagtgaggataccaaatcagaagaaaaggagactgaagagaacaaagaactcactgatacatgtaaagaaagagaaagtgatactgggaagaagaaagtagaacatgaaatttccgaaggaaatgttgccacagccgcagcagctgctcttgcctcagcggctaccaaagccaagcacctggctgcagtggaagaaagaaagatcaagtccctggtagctctcttggttgagacacaaatgaagaaactagagatcaaacttcgacattttgaagagctggaaactatcatggacagagagaaagaagctctagaacaacagaggcagcagttgcttactgaacgccaaaacttccacatggaacagctgaagtatgctgaattacgagcacgacagcaaatggaacagcagcagcatggccagaaccctcaacaggcacaccagcactcaggaggacctggcctggccccacttggagcagcagggcaccctggcatgatgcctcatcaacagccccctccctaccctctgatgcaccaccagatgccaccacctcatccaccccagccaggtcagataccaggcccaggttccatgatgcccgggcagcacatgccaggccgcatgattcccactgttgcagccaacatccacccctctgggagtggccctacccctcctggcatgccaccaatgccaggaaacatcttaggaccccgggtacccctgacagcacctaacggcatgtatccccctccaccacagcagcagccaccgccaccaccacctgcagatggggtccctccgcctcctgctcctggcccgccagcctcagctgctccttagcctggaagatgcagggaacctccacgcccaccaccatgagctggagtggggatgacaagacttgtgttcctcaactttcttgggtttctttcaggatttttcttctcacagctccaagcacgtgtcccgtgcctccccactcctcttaccacccctctctctgacactttttgtgttgggtcctcagccaacactcaaggggaaacctgtagtgacagtgtgccctggtcatccttaaaataacctgcatctcccctgtcctggtgtgggagtaagctgacagtttctctgcaggtcctgtcaactttagcatgctatgtctttaccatttttgctctcttgcagttttttgctttgtcttatgcttctatggataatgctatataatcattatctttttatctttctgttattattgttttaaaggagagcatcctaagttaataggaaccaaaaaataatgatgggcagaagggggggaatagccacaggggacaaaccttaaggcattataagtgaccttatttctgcttttctgagctaagaatggtgctgatggtaaagtttgagacttttgccacacacaaatttgtgaaaattaaacgagatgtggaaggagaacctcagtgattttattccctagtgaggcctctgagggcctccacactgcctggcagaacataccactgaactagtatgtgctagaggagggcacaaacatccgctccttccctaggcctgctggctctggttttctatgcagatgattcattggattgggggtgagtgttttgtttttctgggggcagtgtgagctttgagggttggaatattgggaggcattccttagtttcctcaactagcctggaaagttaggagtctagggtaattaccccccaatgagtctagcctactattcactgctttgtgtgcatttttttctccctctttaaaaaaccctttaaaagaaaaaaaaaagtagatagtgctaaatattttagctcatgaaacttggttaggatggctgggggtacaagtccccaaactacctcttgttacagtagccagggagtggaatttcgtcaaccggtacttttaaggttaggatgggacgggaaaagtgaagcaggatattagctccttataccttctcccttccatttctgagatctcacattccatctatcacagggttttcaaagagatgctgagggtaacaaggaactcacttggcagtcagagcatcatgctttgaggtttggggtgctcaggctgggagggtagaatgccattccagaggacaagccacaaaaatgccttaatttgagctcgtatttacccctgctgataagtgacttgagagttcccggttttttcctcttgtccttccctcccttctgtccttccatgtgtggggaaagggtgtttttggtagagcttggtttccaaagcgcctggctttctcacttcacattctcaagtggcagtttcattatttagaatgcaaggtggacatcttttggatatctttttctatatattttctaaagctttacatatgagagggtatagggaggtgtttataaaacacttgagaacttttttccttaatatcagaaagcaaaaaaataaaaccacaattgagatttgcctttcaaaccctcaggtttgcctctaaccaggtgtccctggtcaccatcagagtactggaatacgggaaccgaggagaccttggtccttttgtttttgttctggactcttgggagtggaaatgagaatgagtttattcctactggagcttagttccaatgcatttggctccagaaagaccccagtgccttttgacaatggccagggttttacctacttcctgccagtctttcccaaaggaaactcattccaaatacttcttttttcccctggagtccgagaaggaaaatggaattctggttcatactgtggtcccttgtaacctcaggtctttaatgtgatcactttcaaatttaaaagatccaggtggaaatatttttactatagtaataattctacaaaatacctgaattcttaacactgttatatttcagtataagtggtggctttttcttttcatgtctttgatctggttttattcctgtaattcagccacctgattttgtgaggggggggaataatatgtggtttttgtacaaacatgtttctcagtgtgttgttattttggaaaaaatgaggggagggagtttggcaagaatggagaaaatgaatgaagaaggcctaatctctctctttttcagtgaataaatggaacaccatttctggattctagtcccattctctgcattcatacaccagtttcttcatatatcctatgaagaacctaaacatttggccccacctggtcttggtttgatcagcagttaaaattctgtgactcgggcttccttcccgactgcccaccttcatgatgtgtaaggaacatacattttgagggtacctcacccactgttcatttgcatggtcaaagtgaaaatgagtggaagttctccaaaaatgatggccaacatcctggcacctccaggtgtgagaaatagctttgcttggtgaatgggataatgtttgtcaggatgcagtttagacagtcccaagttggaggcaggccttgagggcagaagattctgtgaaccttgggggacagcttttgggtactcacagatataaaccctgtgcagaaaaaaagaagtgattgttttcaggatgcttataaatcgagtgaagcaaaa

SEQ ID NO: 1017 - DNA, 5066 bp, Homo sapiens
ggaggcggcgggaggcgggcggaggaggaggcggaggaggcgggagctgagctgagtggggcgggcggcggcggggcccgagccggagaagatggcggtgcggaagaaggacggcggccccaacgtgaagtactacgaggccgcggacaccgtgacccagttcgacaacgtgcggctgtggctcggcaagaactacaagaagtatatacaagctgaaccacccaccaacaagtccctgtctagcctggttgtacagttgctacaatttcaggaagaagtttttggcaaacatgtcagcaatgcaccgctcactaaactgccgatcaaatgtttcctagatttcaaagcgggaggctccttgtgccacattcttgcagctgcctacaaattcaagagtgaccagggatggcggcgttacgatttccagaatccatcacgcatggaccgcaatgtggaaatgtttatgaccattgagaagtccttggtgcagaataattgcctgtctcgacctaacatttttctgtgcccagaaattgagcccaaactactagggaaattaaaggacattatcaagagacaccagggaacagtcactgaggataagaacaatgcctcccatgttgtgtatcctgtcccggggaatctagaagaagaggaatgggtacgaccagtcatgaagagggataagcaggttcttctgcactggggctactatcctgacagttacgacacgtggatcccagcgagtgaaattgaggcatctgtggaagatgctccaactcctgagaaacctaggaaggttcatgcaaagtggatcctggacaccgacaccttcaatgaatggatgaatgaggaagactatgaagtaaatgatgacaaaaaccctgtctcccgccgaaagaagatttcagccaagacactgacagatgaggtgaacagcccagattcagatcgacgggacaagaaggggggaaactataagaagaggaagcgctccccctctccttcaccaaccccagaagcaaagaagaaaaatgctaagaaaggtccctcaacaccttacactaagtcaaagcgtggccacagagaagaggagcaagaagacctgacaaaggacatggacgagccctcaccagtccccaatgtagaagaggtgacacttcccaaaacagtcaacacaaagaaagactcagagtcggccccagtcaaaggcggcaccatgaccgacctggatgaacaggaagatgaaagcatggagacgacgggcaaggatgaggatgagaacagtacggggaacaagggagagcagaccaagaatccagacctgcatgaggacaatgtgactgaacagacccaccacatcatcattcccagctacgctgcctggtttgactacaatagtgttcatgccattgagcggagggctctccccgagttcttcaacggcaagaacaagtccaagactccagagatctacctggcctatcgaaactttatgattgacacttaccgactgaacccccaagagtatcttacctctaccgcctgccgccgaaacctagcgggtgatgtctgtgccatcatgagggtccatgccttcctagaacagtggggtcttattaactaccaggtggatgctgagagtcgaccaaccccaatggggcctccgcctacctctcacttccatgtcttggctgacacaccatcagggctggtgcctctgcagcccaagacacctcagcagacctctgcttcccaacaaatgctcaactttcctgacaaaggcaaagagaaaccaacagacatgcaaaactttgggctgcgcacagacatgtacacaaaaaagaatgttccctccaagagcaaggctgcagccagtgccactcgtgagtggacagaacaggaaaccctgcttctcctggaggcactggaaatgtacaaagatgactggaacaaagtgtccgagcatgtgggaagccgcacacaggacgagtgcatcttgcattttcttcgtcttcccattgaagacccatacctggaggactcagaggcctccctaggccccctggcctaccaacccatccccttcagtcagtcgggcaaccctgttatgagcactgttgccttcctggcctctgtcgtcgatccccgagtcgcctctgctgctgcaaagtcagccctagaggagttctccaaaatgaaggaagaggtacccacggccttggtggaggcccatgttcgaaaagtggaagaagcagccaaagtaacaggcaaggcggaccctgccttcggtctggaaagcagtggcattgcaggaaccacctctgatgagcctgagcggattgaggagagcgggaatgacgaggctcgggtggaaggccaggccacagatgagaagaaggagcccaaggaaccccgagaaggagggggtgctatagaggaggaagcaaaagagaaaaccagcgaggctcccaagaaggatgaggagaaagggaaagaaggcgacagtgagaaggagtccgagaagagtgatggagacccaatagtcgatcctgagaaggagaaggagccaaaggaagggcaggaggaagtgctgaaggaagtggtggagtctgagggggaaaggaagacaaaggtggagcgggacattggcgagggcaacctctccaccgctgctgccgccgccctggccgccgccgcagtgaaagctaagcacttggctgctgttgaggaaaggaagatcaaatctttggtggccctgctggtggagacccagatgaaaaagttggagatcaaacttcggcactttgaggagctggagactatcatggaccgggagcgagaagcactggagtatcagaggcagcagctcctggccgacagacaagccttccacatggagcagctgaagtatgcggagatgagggctcggcagcagcacttccaacagatgcaccaacagcagcagcagccaccaccagccctgcccccaggctcccagcctatccccccaacaggggctgctgggccacccgcagtccatggcttggctgtggctccagcctctgtagtccctgctcctgctggcagtggggcccctccaggaagtttgggcccttctgaacagattgggcaggcagggtcaactgcagggccacagcagcagcaaccagctggagccccccagcctggggcagtcccaccaggggttcccccccctggaccccatggcccctcaccgttccccaaccaacaaactcctccctcaatgatgccaggggcagtgccaggcagcgggcacccaggcgtggcgggtaatgctcctttgggtttgccttttggcatgccgcctcctcctcctcctcctgctccatccatcatcccatttggtagtctagctgactccatcagtattaacctccccgctcctcctaacctgcatgggcatcaccaccatctcccgttcgccccgggcactctccccccacctaacctgcctgtgtccatggcgaaccctctacatcctaacctgccggcgaccaccaccatgccatcttccttgcctctcgggccggggctcggatccgccgcagcccaaagccctgccattgtggcagctgttcagggcaacctcctgcccagtgccagcccactgccagacccaggcacccccctgcctccagaccccacagccccgagcccaggcacggtcacccctgtgccacctccacagtgaggagccagccagacatctctccccctcaccccctgtggacatcacggttccaggaacagcccttcccccaccactgggaccctccccagcctggagagttcatcactacgtaaggaaagctccttccgcccctccaaagccctcaccatgcctaacagaggcatgcatttttatatcagattattcaaggacttctgtttaaaagatgtttataatgtctgggagagaggataggatgggaatgctgccctaaaggaagggctggtgaaaggtgtttatacaaggttctattaaccacttctaagggtacacctccctccaaactactgcattttctatggattaaaaaaaaaaaaaaaaagtagattttaaaaagccacattggagctcccttctacccactaaaaaataaccaatttttacattttttgagggggagtgagttttaggaaaggggaattaagattccagggagagctctggggatagaacagggcgcagattccatctctccccaagcccctttttagtgactaagtcaaggccccaactcccctcccccaccctacgctgagcttattcgagttcattcgtactaataatccctcctgcggcttcctcattgttgctgttttaggccaccccagctcagccaatgattcctttccctctgaatgtcagttttgtttttaaaagtcacttgcttagttgatgtcagcgtatgtgtatttggtggggaaaacctaatttcggggatttctgtggtaggtaataggagaagaaagggcactgggggctgttctccttccttccctgggctgtatccatggactcctggaaggcacagagaagggagctataagaggatgtgaagttttaaaacctgaaattgttttttaaagcacttaagcacctccatattatgacttggtgggtcaccccttagcttcctccctctcccaccaagactatgagaacttcagctgatagctgggggctccccagatgaggatgcagggatttgggagcagtggaagagggtgcccaaccttgggttggaccaacccttggctcgcagctcaactctgcttcccgcattcctgctccacgtgtcccagcttctcccctgtgacgggaaggcaggtgtgactccaggctctgcactggttcttcttggttcctcccaccaggccctttgttcctcatgtccccatgtttctctccctctgcgtcttagcacctttcttctgttcaaagttttctgtaaattttctctttttttctttctttcttttttttttttttataaattaatttgctttcagttcca

SEQ ID NO: 1018 - DNA, 3786 bp, Homo sapiens
ggcgggcggcggcggggcccgagccggagaagatggcggtgcggaagaaggacggcggccccaacgtgaagtactacgaggccgcggacaccgtgacccagttcgacaacgtgcggctgtggctcggcaagaactacaagaagtatatacaagctgaaccacccaccaacaagtccctgtctagcctggttgtacagttgctacaatttcaggaagaagtttttggcaaacatgtcagcaatgcaccgctcactaaactgccgatcaaatgtttcctagatttcaaagcgggaggctccttgtgccacattcttgcagctgcctacaaattcaagagtgaccagggatggcggcgttacgatttccagaatccatcacgcatggaccgcaatgtggaaatgtttatgaccattgagaagtccttggtgcagaataattgcctgtctcgacctaacatttttctgtgcccagaaattgagcccaaactactagggaaattaaaggacattatcaagagacaccagggaacagtcactgaggataagaacaatgcctcccatgttgtgtatcctgtcccggggaatctagaagaagaggaatgggtacgaccagtcatgaagagggataagcaggttcttctgcactggggctactatcctgacagttacgacacgtggatcccagcgagtgaaattgaggcatctgtggaagatgctccaactcctgagaaacctaggaaggttcatgcaaagtggatcctggacaccgacaccttcaatgaatggatgaatgaggaagactatgaagtaaatgatgacaaaaaccctgtctcccgccgaaagaagatttcagccaagacactgacagatgaggtgaacagcccagattcagatcgacgggacaagaaggggggaaactataagaagaggaagcgctccccctctccttcaccaaccccagaagcaaagaagaaaaatgctaagaaaggtccctcaacaccttacactaagtcaaagcgtggccacagagaagaggagcaagaagacctgacaaaggacatggacgagccctcaccagtccccaatgtagaagaggtgacacttcccaaaacagtcaacacaaagaaagactcagagtcggccccagtcaaaggcggcaccatgaccgacctggatgaacaggaagatgaaagcatggagacgacgggcaaggatgaggatgagaacagtacggggaacaagggagagcagaccaagaatccagacctgcatgaggacaatgtgactgaacagacccaccacatcatcattcccagctacgctgcctggtttgactacaatagtgttcatgccattgagcggagggctctccccgagttcttcaacggcaagaacaagtccaagactccagagatctacctggcctatcgaaactttatgattgacacttaccgactgaacccccaagagtatcttacctctaccgcctgccgccgaaacctagcgggtgatgtctgtgccatcatgagggtccatgccttcctagaacagtggggtcttattaactaccaggtggatgctgagagtcgaccaaccccaatggggcctccgcctacctctcacttccatgtcttggctgacacaccatcagggctggtgcctctgcagcccaagacacctcagggccgccaggttgatgctgataccaaggctgggcgaaagggcaaagagctggatgacctggtgccagagacggctaagggcaagccagagctgcagacctctgcttcccaacaaatgctcaactttcctgacaaaggcaaagagaaaccaacagacatgcaaaactttgggctgcgcacagacatgtacacaaaaaagaatgttccctccaagagcaaggctgcagccagtgccactcgtgagtggacagaacaggaaaccctgcttctcctggaggcactggaaatgtacaaagatgactggaacaaagtgtccgagcatgtgggaagccgcacacaggacgagtgcatcttgcattttcttcgtcttcccattgaagacccatacctggaggactcagaggcctccctaggccccctggcctaccaacccatccccttcagtcagtcgggcaaccctgttatgagcactgttgccttcctggcctctgtcgtcgatccccgagtcgcctctgctgctgcaaagtcagccctagaggagttctccaaaatgaaggaagaggtacccacggccttggtggaggcccatgttcgaaaagtggaagaagcagccaaagtaacaggcaaggcggaccctgccttcggtctggaaagcagtggcattgcaggaaccacctctgatgagcctgagcggattgaggagagcgggaatgacgaggctcgggtggaaggccaggccacagatgagaagaaggagcccaaggaaccccgagaaggagggggtgctatagaggaggaagcaaaagagaaaaccagcgaggctcccaagaaggatgaggagaaagggaaagaaggcgacagtgagaaggagtccgagaagagtgatggagacccaatagtcgatcctgagaaggagaaggagccaaaggaagggcaggaggaagtgctgaaggaagtggtggagtctgagggggaaaggaagacaaaggtggagcgggacattggcgagggcaacctctccaccgctgctgccgccgccctggccgccgccgcagtgaaagctaagcacttggctgctgttgaggaaaggaagatcaaatctttggtggccctgctggtggagacccagatgaaaaagttggagatcaaacttcggcactttgaggagctggagactatcatggaccgggagcgagaagcactggagtatcagaggcagcagctcctggccgacagacaagccttccacatggagcagctgaagtatgcggagatgagggctcggcagcagcacttccaacagatgcaccaacagcagcagcagccaccaccagccctgcccccaggctcccagcctatccccccaacaggggctgctgggccacccgcagtccatggcttggctgtggctccagcctctgtagtccctgctcctgctggcagtggggcccctccaggaagtttgggcccttctgaacagattgggcaggcagggtcaactgcagggccacagcagcagcaaccagctggagccccccagcctggggcagtcccaccaggggttcccccccctggaccccatggcccctcaccgttccccaaccaacaaactcctccctcaatgatgccaggggcagtgccaggcagcgggcacccaggcgtggcggacccaggcacccccctgcctccagaccccacagccccgagcccaggcacggtcacccctgtgccacctccacagtgaggagccagccagacatctctccccctcaccccctgtggacatcacggttccaggaacagcccttcccccaccactgggaccctccccagcctggagagttcatcactacgtaaggaaagctccttccgcccctccaaagccctcaccatgcctaacagaggcatgcatttttatatcagattattcaaggacttctgtttaaaagatgtttataatgtctgggagagaggataggatgggaatgctgccctaaaggaagggctggtgaaaggtgtttatacaaggttctattaaccacttctaagggtacacctccctccaaactactgcattttctatggattaaaaaaaaaaaaaaaaa

SEQ ID NO: 1019 - DNA, 4587 bp, Homo sapiens
ggaggcggcgggaggcgggcggaggaggaggcggaggaggcgggagctgagctgagtggggcgggcggcggcggggcccgagccggagaagatggcggtgcggaagaaggacggcggccccaacgtgaagtactacgaggccgcggacaccgtgacccagttcgacaacgtgcggctgtggctcggcaagaactacaagaagtatatacaagctgaaccacccaccaacaagtccctgtctagcctggttgtacagttgctacaatttcaggaagaagtttttggcaaacatgtcagcaatgcaccgctcactaaactgccgatcaaatgtttcctagatttcaaagcgggaggctccttgtgccacattcttgcagctgcctacaaattcaagagtgaccagggatggcggcgttacgatttccagaatccatcacgcatggaccgcaatgtggaaatgtttatgaccattgagaagtccttggtgcagaataattgcctgtctcgacctaacatttttctgtgcccagaaattgagcccaaactactagggaaattaaaggacattatcaagagacaccagggaacagtcactgaggataagaacaatgcctcccatgttgtgtatcctgtcccggggaatctagaagaagaggaatgggtacgaccagtcatgaagagggataagcaggttcttctgcactggggctactatcctgacagttacgacacgtggatcccagcgagtgaaattgaggcatctgtggaagatgctccaactcctgagaaacctaggaaggttcatgcaaagtggatcctggacaccgacaccttcaatgaatggatgaatgaggaagactatgaagtaaatgatgacaaaaaccctgtctcccgccgaaagaagatttcagccaagacactgacagatgaggtgaacagcccagattcagatcgacgggacaagaaggggggaaactataagaagaggaagcgctccccctctccttcaccaaccccagaagcaaagaagaaaaatgctaagaaaggtccctcaacaccttacactaagtcaaagcgtggccacagagaagaggagcaagaagacctgacaaaggacatggacgagccctcaccagtccccaatgtagaagaggtgacacttcccaaaacagtcaacacaaagaaagactcagagtcggccccagtcaaaggcggcaccatgaccgacctggatgaacaggaagatgaaagcatggagacgacgggcaaggatgaggatgagaacagtacggggaacaagggagagcagaccaagaatccagacctgcatgaggacaatgtgactgaacagacccaccacatcatcattcccagctacgctgcctggtttgactacaatagtgttcatgccattgagcggagggctctccccgagttcttcaacggcaagaacaagtccaagactccagagatctacctggcctatcgaaactttatgattgacacttaccgactgaacccccaagagtatcttacctctaccgcctgccgccgaaacctagcgggtgatgtctgtgccatcatgagggtccatgccttcctagaacagtggggtcttattaactaccaggtggatgctgagagtcgaccaaccccaatggggcctccgcctacctctcacttccatgtcttggctgacacaccatcagggctggtgcctctgcagcccaagacacctcagggccgccaggttgatgctgataccaaggctgggcgaaagggcaaagagctggatgacctggtgccagagacggctaagggcaagccagagctgcagacctctgcttcccaacaaatgctcaactttcctgacaaaggcaaagagaaaccaacagacatgcaaaactttgggctgcgcacagacatgtacacaaaaaagaatgttccctccaagagcaaggctgcagccagtgccactcgtgagtggacagaacaggaaaccctgcttctcctggaggcactggaaatgtacaaagatgactggaacaaagtgtccgagcatgtgggaagccgcacacaggacgagtgcatcttgcattttcttcgtcttcccattgaagacccatacctggaggactcagaggcctccctaggccccctggcctaccaacccatccccttcagtcagtcgggcaaccctgttatgagcactgttgccttcctggcctctgtcgtcgatccccgagtcgcctctgctgctgcaaagtcagccctagaggagttctccaaaatgaaggaagaggtacccacggccttggtggaggcccatgttcgaaaagtggaagaagcagccaaagtaacaggcaaggcggaccctgccttcggtctggaaagcagtggcattgcaggaaccacctctgatgagcctgagcggattgaggagagcgggaatgacgaggctcgggtggaaggccaggccacagatgagaagaaggagcccaaggaaccccgagaaggagggggtgctatagaggaggaagcaaaagagaaaaccagcgaggctcccaagaaggatgaggagaaagggaaagaaggcgacagtgagaaggagtccgagaagagtgatggagacccaatagtcgatcctgagaaggagaaggagccaaaggaagggcaggaggaagtgctgaaggaagtggtggagtctgagggggaaaggaagacaaaggtggagcgggacattggcgagggcaacctctccaccgctgctgccgccgccctggccgccgccgcagtgaaagctaagcacttggctgctgttgaggaaaggaagatcaaatctttggtggccctgctggtggagacccagatgaaaaagttggagatcaaacttcggcactttgaggagctggagactatcatggaccgggagcgagaagcactggagtatcagaggcagcagctcctggccgacagacaagccttccacatggagcagctgaagtatgcggagatgagggctcggcagcagcacttccaacagatgcaccaacagcagcagcagccaccaccagccctgcccccaggctcccagcctatccccccaacaggggctgctgggccacccgcagtccatggcttggctgtggctccagcctctgtagtccctgctcctgctggcagtggggcccctccaggaagtttgggcccttctgaacagattgggcaggcagggtcaactgcagggccacagcagcagcaaccagctggagccccccagcctggggcagtcccaccaggggttcccccccctggaccccatggcccctcaccgttccccaaccaacaaactcctccctcaatgatgccaggggcagtgccaggcagcgggcacccaggcgtggcggacccaggcacccccctgcctccagaccccacagccccgagcccaggcacggtcacccctgtgccacctccacagtgaggagccagccagacatctctccccctcaccccctgtggacatcacggttccaggaacagcccttcccccaccactgggaccctccccagcctggagagttcatcactacgtaaggaaagctccttccgcccctccaaagccctcaccatgcctaacagaggcatgcatttttatatcagattattcaaggacttctgtttaaaagatgtttataatgtctgggagagaggataggatgggaatgctgccctaaaggaagggctggtgaaaggtgtttatacaaggttctattaaccacttctaagggtacacctccctccaaactactgcattttctatggattaaaaaaaaaaaaaaaaagtagattttaaaaagccacattggagctcccttctacccactaaaaaataaccaatttttacattttttgagggggagtgagttttaggaaaggggaattaagattccagggagagctctggggatagaacagggcgcagattccatctctccccaagcccctttttagtgactaagtcaaggccccaactcccctcccccaccctacgctgagcttattcgagttcattcgtactaataatccctcctgcggcttcctcattgttgctgttttaggccaccccagctcagccaatgattcctttccctctgaatgtcagttttgtttttaaaagtcacttgcttagttgatgtcagcgtatgtgtatttggtggggaaaacctaatttcggggatttctgtggtaggtaataggagaagaaagggcactgggggctgttctccttccttccctgggctgtatccatggactcctggaaggcacagagaagggagctataagaggatgtgaagttttaaaacctgaaattgttttttaaagcacttaagcacctccatattatgggaaggcaggtgtgactccaggctctgcactggttcttcttggttcctcccaccaggccctttgttcctcatgtccccatgtttctctccctctgcgtcttagcacctttcttctgttcaaagttttctgtaaattttctctttttttctttctttcttttttttttttttataaatt

SEQ ID NO: 1020 - DNA, 2633 bp, Homo sapiens
tgcctctggctcctcagggcattcccggcggctccgggtttggcaacgaggacgggggagtgcgactgcgtctcgggcagcatggccgagaagcggcacacacgggactccgaagcccagcggctccccgactccttcaaggacagccccagtaagggccttggaccttgcggatggattttggtggcgttctcattcttattcaccgttataactttcccaatctcaatatggatgtgcataaagattataaaagagtatgaaagagccatcatctttagattgggtcgcattttacaaggaggagccaaaggacctggtttgttttttattctgccatgcactgacagcttcatcaaagtggacatgagaactatttcatttgatattcctcctcaggagatcctcacaaaggattcagtgacaattagcgtggatggtgtggtctattaccgcgttcagaatgcaaccctggctgtggcaaatatcaccaacgctgactcagcaacccgtcttttggcacaaactactctgaggaatgttctgggcaccaagaatctttctcagatcctctctgacagagaagaaattgcacacaacatgcagtctactctggatgatgccactgatgcctggggaataaaggtggagcgtgtggaaattaaggatgtgaaactacctgtgcagctccagagagctatggctgcagaagcagaagcgtcccgcgaggcccgcgccaaggttattgcagccgaaggagaaatgaatgcatccagggctctgaaagaagcctccatggtcatcactgaatctcctgcagcccttcagctccgatacctgcagacactgaccaccattgctgctgagaaaaactcaacaattgtcttccctctgcccatagatatgctgcaaggaatcataggggcaaaacacagccatctaggctagtgtagagatgagcgctagccttccaagcatgaagtcggggaccaaattagcctttaactcataaagagagggtagggcttttctttttccatatgtcaattgtggtgttcccagaatgtatagcagttataaaaataggtgaaagaattgttagcttgtaaatactgagagattggtgatttatataaggtaatctgttagtcttaaaatagttaaaagtttgtatttttagattattatgtagtaggttagatccctcttgttttgacttccactgactcattctgaaccccctaagcacccaggccagaggcaagaacctgggctgtaactgccacctgacaccgctgactggctaaatgctttgcagaaagtgatgaccttacaccacaaccagcttctccaggtcatatgtgccttacctccagagagtctttttttttttttttctgagatggagtttcactcttgttgcccaggctggagtgcaatagcatgatctcggctcactgcaacctccgcctcctgggttcaagagattctcctgcctcagcctccccagtagctgggattacaggctcatgccaccatgcccagctaatttttgtattattattattgttttttagtagagacggggtttcaccatgttggccaggctagtcacgaactcctaacctcaggtgatccacccacctctgcctcccaaagtgctgggattacaggcatgagctaccacacctggtttggagagtcttaattaaggaaatttccctaatgttcatttattttctaaatccagaccgtgtttcagaataatcctgaaaaagattactctaacccttaaaagacttttaaattcactactagagtggtcattttaaaaatacatccatgttttaacttatttgagccttctttatgagtaaatgattcctccttgttctgtctttcaaaccagctaaatatttgtcacaaaagtgcttttttctcactgttgcctattttcatatatcaggttttaaatagttttaattttttaataaaattttctctacgttctatatgcaattgttatatatctatttgaatagctgaaggactaaaatacttttttaagagataacttcaggaaaccattatattttactatctgcatgctgttaactgtggtacactgtgaaatatgttgattacaaacccattcattacatagtataaggaattcacagtatattgactatatagtgtctaatgatcttgggcagatactgtcaaacttacaatatctatatagatgtaggtctttttaaatttacctagtcattcttctatcatgtatattgatgctgaaagaggaactggtcagctcctctggacaacaaattcttagtctataatattaggagacatcttctgttttgcaaatgtctgtgaatctgagcaacctggcattctgcttactggccagaaagctggcgggtgacatttgtaacatttcctctttgagactctgagttcacctagagaagtctaagcataacagctttctttcccagcacgagcctttatagctctctttagctcaaccactctgtccatccagccaatggatgtcccttcccctgtaccccaatttcaagcttattttaggaagccttgaactaccatgtatcctggctcct

SEQ ID NO: 1021 - DNA, 919 bp, Homo sapiens
atggccgagaagcggcacacacgggactccgaagcccagcggctccccgactccttcaaggacagccccagtaagggccttggaccttgcggatggattttggtggcgttctcattcttattcaccgttataactttcccaatctcaatatggatgtgcataaagattataaaagagtatgaaagagccatcatctttagattgggtcgcattttacaaggaggagccaaaggacctggtttgttttttattctgccatgcactgacagcttcatcaaagtggacatgagaactatttcatttgatattcctcctcaggagatcctcacaaaggattcagtgacaattagcgtggatggtgtggtctattaccgcgttcagaatgcaaccctggctgtggcaaatatcaccaacgctgactcagcaacccgtcttttggcacaaactactctgaggaatgttctgggcaccaagaatctttctcagatcctctctgacagagaagaaattgcacacaacatgcagtctactctggatgatgccactgatgcctggggaataaaggtggagcgtgtggaaattaaagatgtgaaactacctgtgcagctccagagagctatggctgcagaagcagaagcgtcccgcgaggcccgcgccaaggttattgcagccgaaggagaaatgaatgcatccagggctctgaaagaagcctccatggtcatcactgaatctcctgcagcccttcagctccgatacctgcagacactgaccaccattgctgctgagaaaaactcaacaattgtcttccctctgcccatagatatgctgcaaggaatcataggggcaaaacacagccatctaggctagtgtagagatgagcgctagccttccaagcatgaagtcggggaccaaattagcg

SEQ ID NO: 1022 - DNA, 3142 bp, Homo sapiens
tgcctctggctcctcagggcattcccggcggctccgggtttggcaacgaggacgggggagtgcgactgcgtctcgggcagcatggccgagaagcggcacacacgggactccgaagcccagcggctccccgactccttcaaggacagccccagtaagggccttggaccttgcggatggattttggtggcgttctcattcttattcaccgttataactttcccaatctcaatatggatgtgcataaagattataaaagagtatgaaagagccatcatctttagattgggtcgcattttacaaggaggagccaaaggacctggtttgttttttattctgccatgcactgacagcttcatcaaagtggacatgagaactatttcatttgatattcctcctcaggagatcctcacaaaggattcagtgacaattagcgtggatggtgtggtctattaccgcgttcagaatgcaaccctggctgtggcaaatatcaccaacgctgactcagcaacccgtcttttggcacaaactactctgaggaatgttctgggcaccaagaatctttctcagatcctctctgacagagaagaaattgcacacaacatgcagtctactctggatgatgccactgatgcctggggaataaaggtggagcgtgtggaaattaaggatgtgaaactacctgtgcagctccagagagctatggctgcagaagcagaagcgtcccgcgaggcccgcgccaaggttattgcagccgaaggagaaatgaatgcatccagggctctgaaagaagcctccatggtcatcactgaatctcctgcagcccttcagctccgatacctgcagacactgaccaccattgctgctgagaaaaactcaacaattgtcttccctctgcccatagatatgctgcaaggaatcataggggcaaaacacagccatctaggctagtgtagagatgagcgctagccttccaagcatgaagtcggggaccaaattagcctttaactcataaagagagggtagggcttttctttttccatatgtcaattgtggtgttcccagaatgtatagcagttataaaaataggtgaaagaattgttagcttgtaaatactgagagattggtgatttatataaggtaatctgttagtcttaaaatagttaaaagtttgtatttttagattattatgtagtaggttagatccctcttgttttgacttccactgactcattctgaaccccctaagcacccaggccagaggcaagaacctgggctgtaactgccacctgacaccgctgactggctaaatgctttgcagaaagtgatgaccttacaccacaaccagcttctccaggtcatatgtgccttacctccagagagtctttttttttttttttctgagatggagtttcactcttgttgcccaggctggagtgcaatagcatgatctcggctcactgcaacctccgcctcctgggttcaagagattctcctgcctcagcctccccagtagctgggattacaggctcatgccaccatgcccagctaatttttgtattattattattgttttttagtagagacggggtttcaccatgttggccaggctagtcacgaactcctaacctcaggtgatccacccacctctgcctcccaaagtgctgggattacaggcatgagctaccacacctggtttggagagtcttaattaaggaaatttccctaatgttcatttattttctaaatccagaccgtgtttcagaataatccttacttgagagtagccattttcttgcctgtacttgtcagaactagaggaaatagccaagactaatgaaaaagattactctaacccttaaaagacttttaaattcactactagagtggtcattttaaaaatacatccatgttttaacttatttgagccttctttatgagtaaatgattcctccttgttctgtctttcaaaccagctaaatatttgtcacaaaagtgcttttttctcactgttgcctattttcatatatcaggttttaaatagttttaattttttaataaaattttctctacgttctatatgcaattgttatatatctatttgaatagctgaaggactaaaatacttttttaagagataacttcaggaaaccattatattttactatctgcatgctgttaactgtggtacactgtgaaatatgttgattacaaacccattcattacatagtataaggaattcacagtatattgactatatagtgtctaatgatcttgggcagatactgtcaaacttacaatatctatatagatgtaggtctttttaaatttacctagtcattcttctatcatgtatattgatgctgaaagaggaactggtcagctcctctggacaacaaattcttagtctataatattaggagacatcttctgttttgcaaatgtctgtgaatctgagcaacctggcattctgcttactggccagaaagctggcgggtgacatttgtaacatttcctctttgagactctgagttcacctagagaagtctaagcataacagctttctttcccagcacgagcctttatagctctctttagctcaaccactctgtccatccagccaatggatgtcccttcccctgtaccccaatttcaagcttattttaggaagccttgaactaccatgtatcctggctcctagctgagtttattagaggtatggagcagtgcaacttaaactcaagttgcacttacattttgaattttaaaatgatggttttatctgttgtgtgaagtggttcacccttgaggaccaggagcctccatatcctgactgaaaaccttttctgagacttagagtaacagtacttttggttccttgagttctcctgtctccagataccaaatgaccttgacttttctgccttgtgaattcgtagtccaatcagctgaaattaaatcacttgggagggacgcatagaaggagctctaggaacacagtgccagtgcagaagtttctccaggtggcctccctttccaacaatgtacataataaagtgtatgcactttcactaatatttttggggtgagagtctgtttcggcctgtattgaatgtctgtggatttccgttttcagaagtagta

SEQ ID NO: 1023 - DNA, 3090 bp, Homo sapiens
cgaggacgggggagtgcgactgcgtctcgggcagcatggccgagaagcggcacacacgggactccgaagcccagcggctccccgactcagacagccccagtaagggccttggaccttgcggatggattttggtggcgttctcattcttattcaccgttataactttcccaatctcaatatggatgtgcataaagattataaaagagtatgaaagagccatcatctttagattgggtcgcattttacaaggaggagccaaaggacctggtttgttttttattctgccatgcactgacagcttcatcaaagtggacatgagaactatttcatttgatattcctcctcaggagatcctcacaaaggattcagtgacaattagcgtggatggtgtggtctattaccgcgttcagaatgcaaccctggctgtggcaaatatcaccaacgctgactcagcaacccgtcttttggcacaaactactctgaggaatgttctgggcaccaagaatctttctcagatcctctctgacagagaagaaattgcacacaacatgcagtctactctggatgatgccactgatgcctggggaataaaggtggagcgtgtggaaattaaggatgtgaaactacctgtgcagctccagagagctatggctgcagaagcagaagcgtcccgcgaggcccgcgccaaggttattgcagccgaaggagaaatgaatgcatccagggctctgaaagaagcctccatggtcatcactgaatctcctgcagcccttcagctccgatacctgcagacactgaccaccattgctgctgagaaaaactcaacaattgtcttccctctgcccatagatatgctgcaaggaatcataggggcaaaacacagccatctaggctagtgtagagatgagcgctagccttccaagcatgaagtcggggaccaaattagcctttaactcataaagagagggtagggcttttctttttccatatgtcaattgtggtgttcccagaatgtatagcagttataaaaataggtgaaagaattgttagcttgtaaatactgagagattggtgatttatataaggtaatctgttagtcttaaaatagttaaaagtttgtatttttagattattatgtagtaggttagatccctcttgttttgacttccactgactcattctgaaccccctaagcacccaggccagaggcaagaacctgggctgtaactgccacctgacaccgctgactggctaaatgctttgcagaaagtgatgaccttacaccacaaccagcttctccaggtcatatgtgccttacctccagagagtctttttttttttttttctgagatggagtttcactcttgttgcccaggctggagtgcaatagcatgatctcggctcactgcaacctccgcctcctgggttcaagagattctcctgcctcagcctccccagtagctgggattacaggctcatgccaccatgcccagctaatttttgtattattattattgttttttagtagagacggggtttcaccatgttggccaggctagtcacgaactcctaacctcaggtgatccacccacctctgcctcccaaagtgctgggattacaggcatgagctaccacacctggtttggagagtcttaattaaggaaatttccctaatgttcatttattttctaaatccagaccgtgtttcagaataatccttacttgagagtagccattttcttgcctgtacttgtcagaactagaggaaatagccaagactaatgaaaaagattactctaacccttaaaagacttttaaattcactactagagtggtcattttaaaaatacatccatgttttaacttatttgagccttctttatgagtaaatgattcctccttgttctgtctttcaaaccagctaaatatttgtcacaaaagtgcttttttctcactgttgcctattttcatatatcaggttttaaatagttttaattttttaataaaattttctctacgttctatatgcaattgttatatatctatttgaatagctgaaggactaaaatacttttttaagagataacttcaggaaaccattatattttactatctgcatgctgttaactgtggtacactgtgaaatatgttgattacaaacccattcattacatagtataaggaattcacagtatattgactatatagtgtctaatgatcttgggcagatactgtcaaacttacaatatctatatagatgtaggtctttttaaatttacctagtcattcttctatcatgtatattgatgctgaaagaggaactggtcagctcctctggacaacaaattcttagtctataatattaggagacatcttctgttttgcaaatgtctgtgaatctgagcaacctggcattctgcttactggccagaaagctggcgggtgacatttgtaacatttcctctttgagactctgagttcacctagagaagtctaagcataacagctttctttcccagcacgagcctttatagctctctttagctcaaccactctgtccatccagccaatggatgtcccttcccctgtaccccaatttcaagcttattttaggaagccttgaactaccatgtatcctggctcctagctgagtttattagaggtatggagcagtgcaacttaaactcaagttgcacttacattttgaattttaaaatgatggttttatctgttgtgtgaagtggttcacccttgaggaccaggagcctccatatcctgactgaaaaccttttctgagacttagagtaacagtacttttggttccttgagttctcctgtctccagataccaaatgaccttgacttttctgccttgtgaattcgtagtccaatcagctgaaattaaatcacttgggagggacgcatagaaggagctctaggaacacagtgccagtgcagaagtttctccaggtggcctccctttccaacaatgtacataataaagtgtatgcactttcactaatatttttggggtgagagtctgtttcggcctgtattgaatgtctgtggatttccgttttcagaagtagta

SEQ ID NO: 1024 - DNA, 3002 bp, Homo sapiens
agacagccccagtaagggccttggaccttgcggatggattttggtggcgttctcattcttattcaccgttataactttcccaatctcaatatggatgtgcataaagattataaaagagtatgaaagagccatcatctttagattgggtcgcattttacaaggaggagccaaaggacctggtttgttttttattctgccatgcactgacagcttcatcaaagtggacatgagaactatttcatttgatattcctcctcaggagatcctcacaaaggattcagtgacaattagcgtggatggtgtggtctattaccgcgttcagaatgcaaccctggctgtggcaaatatcaccaacgctgactcagcaacccgtcttttggcacaaactactctgaggaatgttctgggcaccaagaatctttctcagatcctctctgacagagaagaaattgcacacaacatgcagtctactctggatgatgccactgatgcctggggaataaaggtggagcgtgtggaaattaaggatgtgaaactacctgtgcagctccagagagctatggctgcagaagcagaagcgtcccgcgaggcccgcgccaaggttattgcagccgaaggagaaatgaatgcatccagggctctgaaagaagcctccatggtcatcactgaatctcctgcagcccttcagctccgatacctgcagacactgaccaccattgctgctgagaaaaactcaacaattgtcttccctctgcccatagatatgctgcaaggaatcataggggcaaaacacagccatctaggctagtgtagagatgagcgctagccttccaagcatgaagtcggggaccaaattagcctttaactcataaagagagggtagggcttttctttttccatatgtcaattgtggtgttcccagaatgtatagcagttataaaaataggtgaaagaattgttagcttgtaaatactgagagattggtgatttatataaggtaatctgttagtcttaaaatagttaaaagtttgtatttttagattattatgtagtaggttagatccctcttgttttgacttccactgactcattctgaaccccctaagcacccaggccagaggcaagaacctgggctgtaactgccacctgacaccgctgactggctaaatgctttgcagaaagtgatgaccttacaccacaaccagcttctccaggtcatatgtgccttacctccagagagtctttttttttttttttctgagatggagtttcactcttgttgcccaggctggagtgcaatagcatgatctcggctcactgcaacctccgcctcctgggttcaagagattctcctgcctcagcctccccagtagctgggattacaggctcatgccaccatgcccagctaatttttgtattattattattgttttttagtagagacggggtttcaccatgttggccaggctagtcacgaactcctaacctcaggtgatccacccacctctgcctcccaaagtgctgggattacaggcatgagctaccacacctggtttggagagtcttaattaaggaaatttccctaatgttcatttattttctaaatccagaccgtgtttcagaataatccttacttgagagtagccattttcttgcctgtacttgtcagaactagaggaaatagccaagactaatgaaaaagattactctaacccttaaaagacttttaaattcactactagagtggtcattttaaaaatacatccatgttttaacttatttgagccttctttatgagtaaatgattcctccttgttctgtctttcaaaccagctaaatatttgtcacaaaagtgcttttttctcactgttgcctattttcatatatcaggttttaaatagttttaattttttaataaaattttctctacgttctatatgcaattgttatatatctatttgaatagctgaaggactaaaatacttttttaagagataacttcaggaaaccattatattttactatctgcatgctgttaactgtggtacactgtgaaatatgttgattacaaacccattcattacatagtataaggaattcacagtatattgactatatagtgtctaatgatcttgggcagatactgtcaaacttacaatatctatatagatgtaggtctttttaaatttacctagtcattcttctatcatgtatattgatgctgaaagaggaactggtcagctcctctggacaacaaattcttagtctataatattaggagacatcttctgttttgcaaatgtctgtgaatctgagcaacctggcattctgcttactggccagaaagctggcgggtgacatttgtaacatttcctctttgagactctgagttcacctagagaagtctaagcataacagctttctttcccagcacgagcctttatagctctctttagctcaaccactctgtccatccagccaatggatgtcccttcccctgtaccccaatttcaagcttattttaggaagccttgaactaccatgtatcctggctcctagctgagtttattagaggtatggagcagtgcaacttaaactcaagttgcacttacattttgaattttaaaatgatggttttatctgttgtgtgaagtggttcacccttgaggaccaggagcctccatatcctgactgaaaaccttttctgagacttagagtaacagtacttttggttccttgagttctcctgtctccagataccaaatgaccttgacttttctgccttgtgaattcgtagtccaatcagctgaaattaaatcacttgggagggacgcatagaaggagctctaggaacacagtgccagtgcagaagtttctccaggtggcctccctttccaacaatgtacataataaagtgtatgcactttcactaatatttttggggtgagagtctgtttcggcctgtattgaatgtctgtggatttccgttttcagaagtagta

SEQ ID NO: 1025 - DNA, 1913 bp, Homo sapiens
aattcggcacgaggcccgacctccgcagtcccagccgagccgcgacccttccggccgtccccaccccacctcgccgccatgcgcctccgccgcctagcgctgttcccgggtgtggcgctgcttcttgccgcggcccgcctcgccgctgcctccgacgtgctagaactcacggacgacaacttcgagagtcgcatctccgacacgggctctgcgggcctcatgctcgtcgagttcttcgctccctggtgtggacactgcaagagacttgcacctgagtatgaagctgcagctaccagattaaaaggaatagtcccattagcaaaggttgattgcactgccaacactaacacctgtaataaatatggagtcagtggatatccaaccctgaagatatttagagatggtgaagaagcaggtgcttatgatggacctaggactgctgatggaattgtcagccacttgaagaagcaggcaggaccagcttcagtgcctctcaggactgaggaagaatttaagaaattcattagtgataaagatgcctctatagtaggttttttcgatgattcattcagtgaggctcactccgagttcctaaaagcagccagcaacttgagggataactaccgatttgcacatacgaatgttgagtctctggtgaacgagtatgatgataatggagagggtatcatcttatttcgtccttcacatctcactaacaagtttgaggacaagactgtggcatatacagagcaaaaaatgaccagtggcaaaattaaaaagtttatccaggaaaacatttttggtatctgccctcacatgacagaagacaataaagatttgatacagggcaaggacttacttattgcttactatgatgtggactatgaaaagaacgctaaaggttccaactactggagaaacagggtaatgatggtggcaaagaaattcctggatgctgggcacaaactcaactttgctgtagctagccgcaaaacctttagccatgaactttctgattttggcttggagagcactgctggagagattcctgttgttgctatcagaactgctaaaggagagaagtttgtcatgcaggaggagttctcgcgtgatgggaaggctctggagaggttcctgcaggattactttgatggcaatctgaagagatacctgaagtctgaacctatcccagagagcaatgatgggcctgtgaaggtagtggtagcagagaattttgatgaaatagtgaataatgaaaataaagatgtgctgattgaattttatgccccttggtgtggtcattgtaagaacctggagcccaagtataaagaacttggcgagaagctcagcaaagacccaaatatcgtcatagccaagatggatgccacagccaatgatgtgccttctccatatgaagtcagaggttttcctaccatatacttctctccagccaacaagaagctaaatccaaagaaatatgaaggtggccgtgaattaagtgattttattagctatctacaaagagaagctacaaacccccctgtaattcaagaagaaaaacccaagaagaagaagaaggcacaggaggatctctaaagcagtagccaaacaccactttgtaaaaggactcttccatcagagatgggaaaaccattggggaggactaggacccatatgggaattattacctctcagggccgagaggacagaatggatataatctgaatcctgttaaattttctctaaactgtttcttagctgcactgtttatggaaataccaggaccagtttatgtttgtggttttgggaaaaattatttgtgttgggggaaatgttgtgggggtggggttgagttgggggtattttctaattttttttgtacatttggaacagtgacaataaatctcgtgccg

SEQ ID NO: 1026 - DNA, 2255 bp, Homo sapiens
atgacaacaaaagactgaagaactgacaacgattagaggacactaaggagacttaacaactaaatgcaaaatgggaccctgaatctgatcctggaacacaaaaactaaattagtagaaaagtggtaaaataggtggtcgcgcgcccgaccgccgcagtcccagtcgagccgcgacccttccggctgcccccaccccacctcgccgccatgtgcctccgccgcccagcgctgttcccgggcgtggcgctgcttctcgccgcggcccgcctcgcggctgcctccgacgtgctaggactcagggacgacaacttggagagtcgcatctccgacacgggctctgcgggcctcatgctcgtcgagttcttcgccccctggtgtggacactgcaagagacttgctcctgagtatgaagctgcagctaccagattaaaaggaatagtcccattagcaaaggctgattgcactgccaacactaacacctgtaataaatatggagtcagtggatatccaaccctgaatatgtttagagatggtgaagaagcaggtgcttatgatggacctaggactgctgatggaattgtcagccacctgaagaagcaggcaggcccagcttcagtgcctctcaggactgaggaagaatttaagaaattcattagtgataaagatgcctctatagtaggttttttcgatgattcattcagtgaagctcactccgagttcctaaaagcagccagcaacttgagggataactaccgatttgcacatacgaatgttgagtctctggtgaacgagtatgatgataacggagatggtatcatcttatttcgtccttcacatctcactaacaagttggaggacaagactgtggcatatacagtgcaaaaaatgaccagtggcaaaattaaaaagtttatccaggaaaacatttttggtatctgccctcacatgacagaagacaataaagatttgatacagggcaaggacttacttattgcttactatgatgtggactatgaaaagaatgctaaaggttccaactactggagaaacagggtaatgatggtggcaaagaaattcctggatgctgggcacaaactcaactttgctgtagctagccgcaaaacctttagccatgaactttctgattttggcttggagagcactgctggagagattcctgttgttgctatcagaactgctaaaggagagaagtttgtcatgcaggaggatttctcgcgtgatgggaatgctctggagaggttcctgcaggattactttgatggcaatctgaagagatacctgaagtctgaacctatcccagagagcaatgatgggcctgtgaaggtagtggtagcagagaattttgatgaaatagtgaataatgaaaataaagatgtgctgattgaattttatgccccttggtgtggtcactgtaagaacctggagcccaagtataaagaacttggcgagaagctcagcaaagacctgaatatcgtcatagccaagatggatgccacagccaatgatgtgccttctccatatgaagtcagagttttcctaccatatacttctctccagccaacaagaagctaaatccaaagaaatatgaaggtggccatgaattaagtgattttattagctatctacaacgagaagctacaaacccccctgtaattcaagaagaaaaacccaagaagaagaaggcacaggaggatctctaaagcagtaggcaaacaccactttgtaaaaggactcttccaccagagatgggaaaaccactggggaggactaggacccatatgggaattattacgtctcagggccgagaggacagaatggatataatctgaatcctgttaaattttctctaagccatttcttagctgcactgttatggaaataccaggaccagtttatgtttgtggttttgggaaaaattatttgtgttgggggaaatgttgtgggagtcgggttgagttgggggtattttctaatttttttgtgcatttggaacagtgacaataaataagacccctttaaactgtaaaaaaaaaaaaaataggaatgcggtccatggtttacttaatcgtataatatcagtgttcattttcttattttgataattgtcataatgttgtgtgaaatattctctttagggagcctgggaaagaatatataagaactctactgtttttgtaacttttgtggaggactgcaatcatttctaaataaatagtcttaaaaataactaaagt

SEQ ID NO: 1027 - DNA, 3070 bp, Homo sapiens
ccgggtttgggggttgggacctccggctgcaggtccgcctgggccagacgcgcgagcgcaagcagcgggttagtggtcgcgcgcccgacctccgcagtcccagccgagccgcgacccttccggccgtccccaccccacctcgccgccatgcgcctccgccgcctagcgctgttcccgggtgtggcgctgcttcttgccgcggcccgcctcgccgctgcctccgacgtgctagaactcacggacgacaacttcgagagtcgcatctccgacacgggctctgcgggcctcatgctcgtcgagttcttcgccccctggtgtggacactgcaagagacttgcacctgagtatgaagctgcagctaccagattaaaaggaatagtcccattagcaaaggttgattgcactgccaacactaacacctgtaataaatatggagtcagtggatatccaaccctgaagatatttagagatggtgaagaagcaggtgcttatgatggacctaggactgctgatggaattgtcagccacttgaagaagcaggcaggaccagcttcagtgcctctcaggactgaggaagaatttaagaaattcattagtgataaagatgcctctatagtaggttttttcgatgattcattcagtgaggctcactccgagttcctaaaagcagccagcaacttgagggataactaccgatttgcacatacgaatgttgagtctctggtgaacgagtatgatgataatggagagggtatcatcttatttcgtccttcacatctcactaacaagtttgaggacaagactgtggcatatacagagcaaaaaatgaccagtggcaaaattaaaaagtttatccaggaaaacatttttggtatctgccctcacatgacagaagacaataaagatttgatacagggcaaggacttacttattgcttactatgatgtggactatgaaaagaacgctaaaggttccaactactggagaaacagggtaatgatggtggcaaagaaattcctggatgctgggcacaaactcaactttgctgtagctagccgcaaaacctttagccatgaactttctgattttggcttggagagcactgctggagagattcctgttgttgctatcagaactgctaaaggagagaagtttgtcatgcaggaggagttctcgcgtgatgggaaggctctggagaggttcctgcaggattactttgatggcaatctgaagagatacctgaagtctgaacctatcccagagagcaatgatgggcctgtgaaggtagtggtagcagagaattttgatgaaatagtgaataatgaaaataaagatgtgctgattgaattttatgccccttggtgtggtcactgtaagaacctggagcccaagtataaagaacttggcgagaagctcagcaaagacccaaatatcgtcatagccaagatggatgccacagccaatgatgtgccttctccatatgaagtcagaggttttcctaccatatacttctctccagccaacaagaagctaaatccaaagaaatatgaaggtggccgtgaattaagtgattttattagctatctacaaagagaagctacaaacccccctgtaattcaagaagaaaaacccaagaagaagaagaaggcacaggaggatctctaaagcagtagccaaacaccactttgtaaaaggactcttccatcagagatgggaaaaccattggggaggactaggacccatatgggaattattacctctcagggccgagaggacagaatggatataatctgaatcctgttaaattttctctaaactgtttcttagctgcactgtttatggaaataccaggaccagtttatgtttgtggttttgggaaaaattatttgtgttgggggaaatgttgtgggggtggggttgagttgggggtattttctaattttttttgtacatttggaacagtgacaataaatgagacccctttaaactgtcttattttccaccagattgagaaccagatgttctctacacactatcactgttcaatagagctttcttcagtgatggaaatgctctgtaatctacactgttcagtacaggtagctacggagcatctgaaatatggctagaaactacatttttgttttgattaatttaaatagccatacagttgctaccatactggtcacggcagctgtagactgactgggtccatagttcatcacctcaaaattctttcaaaatttattatctctttctctccttacatgtttatttcccaggcctaccctggtgattagaacagctgaagggcctttcttgttaggctgtccatgccctaaggatgggttcctgtttatccttgccacgcagctgagcttactgcatgtttatatctcccaaggactgttctctgctcagaaatgccctgtcaagggtgtggcatcacgcagtttcatccaagttgtttcaggaattgctgacactgctgggtgcagttctatcccctaaagcctagggtgtggccctttaacttccccttcagtagaactgggaaaggcagtaccattcctagttatgagtgaagcatccactttcttttgtaacaatgaggaacagaaaggataagactgaagagtgatcttttgtccaactaaaccatttatctccttttgtaggtaaattcaaatcctgcccagttatagttttcagtcactggagaattccaggtaggagccctactttaggtgatcctaggaactcctatgttcagaaaagaattttcttcctactatataattacagtatttagctgtcaattttaagatgaatttggtagagccttatagtaaagtatgtatcttggtcacacacaaagcttggaaaaagtaaaagatgtctaaaccataatcttgtaactcataacatctgggctggggcccggggatctaattgtttagagagccccaaaagtggctcagatgtaaagccagggttaagaaccatctgccttggaagatttaagggaaacatataaacttgtacaaaggacacagaagcagtcagtttt

SEQ ID NO: 1028 - DNA, 153 bp, Homo sapiens
atggccagagcccgggccgctccccgacctccaaccgccagagcgatcacagccgccccccgcacgggggggcttaggggggccaagaacgggtggttcctgcgaaggggctatttcctggcccaagagctgggcagcggtcgtgaagattcg

SEQ ID NO: 1029 - DNA, 3312 bp, Homo sapiens
tgacaatatcaggtgagctgtggaggtggggtccttggaagctggatgacagcagctggcaaggggataagagagcagtgagcccctccctcaaggaggtctggctttatccatagacagggccctctgaggtggggctgaggtacaaagggggattgagcagcccaggagaagagagatgggggttcccttcttctcttctctcagatgcatggtggacttaggaccttgctgggctgggggtctcactgcagagatgaagctgcttctggccctagcagggctcctggccattctggccacgccccagccctctgaaggtgctgctccagctgtcctgggggaggtggacacctcgttggtgctgagctccatggaggaggccaagcagctggtggacaaggcctacaaggagcggcgggaaagcatcaagcagcggcttcgcagcggctcagccagccccatggaactcctatcctacttcaagcagccggtggcagccaccaggacggcggtgagggccgctgactacctgcacgtggctctagacctgctggagaggaagctgcggtccctgtggcgaaggccattcaatgtcactgatgtgctgacgcccgcccagctgaatgtgttgtccaagtcaagcggctgcgcctaccaggacgtgggggtgacttgcccggagcaggacaaataccgcaccatcaccgggatgtgcaacaacaggtgcggctggctgggggtggctgcaggaaccgggctcagagaggcgtcccggacgccacaagcctcccggtgtcagcgccctgtcctcccctgcagacgcagccccacgctgggggcctccaaccgtgcctttgtgcgctggctgccggcggagtatgaggacggcttctctcttccctacggctggacgcccggggtcaagcgcaacggcttcccggtggctctggctcgcgcggtctccaacgagatcgtgcgcttccccactgatcagctgactccggaccaggagcgctcactcatgttcatgcaatggggccagctgttggaccacgacctcgacttcacccctgagccggccgcccgggcctccttcgtcactggcgtcaactgcgagaccagctgcgttcagcagccgccctgcttcccgctcaagatcccgcccaatgacccccgcatcaagaaccaagccgactgcatcccgttcttccgctcctgcccggcttgccccgggagcaacatcaccatccgcaaccagatcaacgcgctcacttccttcgtggacgccagcatggtgtacggcagcgaggagcccctggccaggaacctgcgcaacatgtccaaccagctggggctgctggccgtcaaccagcgcttccaagacaacggccgggccctgctgccctttgacaacctgcacgatgacccctgtctcctcaccaaccgctcagcgcgcatcccctgcttcctggcaggggacacccgttccagtgagatgcccgagctcacctccatgcacaccctcttacttcgggagcacaaccggctggccacagagctcaagagcctgaaccctaggtgggatggggagaggctctaccaggaagcccggaagatcgtgggggccatggtccagatcatcacttaccgggactacctgcccctggtgctggggccaacggccatgaggaagtacctgcccacgtaccgttcctacaatgactcagtggacccacgcatcgccaacgtcttcaccaatgccttccgctacggccacaccctcatccaacccttcatgttccgcctggacaatcggtaccagcccatggaacccaacccccgtgtccccctcagcagggtcttttttgcctcctggagggtcgtgctggaaggtggcattgaccccatcctccggggcctcatggccacccctgccaagctgaatcgtcagaaccaaattgcagtggatgagatccgggagcgattgtttgagcaggtcatgaggattgggctggacctgcctgctctgaacatgcagcgcagcagggaccacggcctcccaggatacaatgcctggaggcgcttctgtgggctcccgcagcctgaaactgtgggccagctgggcacggtgctgaggaacctgaaattggcgaggaaactgatggagcagtatggcacgcccaacaacatcgacatctggatgggcggcgtgtccgagcctctgaagcgcaaaggccgcgtgggcccactcctcgcctgcatcatcggtacccagttcaggaagctccgggatggtgatcggttttggtgggagaacgagggtgtgttcagcatgcagcagcgacaggccctggcccagatctcattgccccggatcatctgcgacaacacaggcatcaccaccgtgtctaagaacaacatcttcatgtccaactcatatccccgggactttgtcaactgcagtacacttcctgcattgaacctggcttcctggagggaagcctcctagaggccaggtaagggggtgcagcagtgaggggtatatctgggctggccagttggaaccacggagatctccttgccctagatgagcccagccctgttctgggtgcagctgagaaaatgagtgactagacgttcatttgtgtgctcatgtatgtgcgaagtatataaattggcttttcatgcgtgtgtgttgtctgaacatggggagtgtttcatgggttatgtgtatgtgccatttatgtgagtgtgtgtttgtgctgatgagaatactgagtatgtggaaggcagcagagcggactggtgaggagcacagctcaggaactagactgcctgggttccaatcctggctctgtggcttgctagctatgtgaccttgagcaaattaccctccttaaacaagagttttcttccttgtaaattacatctgtcatggtttcttggagggcccacttgtatcctctggttcttcatttattgagcacctactacatgcaaggcactgtactaggcgtgagaagcatatagaggcaagaaagagataccaagatgccatctgtgtcctggttagcagagctggaccagtggtgccttggagggataagccagctgcagctgggctgtgtggttgacttatgggcccagccagccaggctcaggccatggctcccctttttcttcctcaccctgatttcttgcttattcactgaagttctcctgaagaggaactgggcctgttgccctttctgtaccatttatttgctcccaatgtttatgataataaaggcaccgctgatggggacctcc

SEQ ID NO: 1030 - DNA, 3226 bp, Homo sapiens
tgacaatatcaggtgagctgtggaggtggggtccttggaagctggatgacagcagctggcaaggggataagagagcagtgagcccctccctcaaggaggtctggctttatccatagacagggccctctgaggtggggctgaggtacaaagggggattgagcagcccaggagaagagagatgggggttcccttcttctcttctctcagatgcatggtggacttaggaccttgctgggctgggggtctcactgcagagatgaagctgcttctggccctagcagggctcctggccattctggccacgccccagccctctgaaggtgctgctccagctgtcctgggggaggtggacacctcgttggtgctgagctccatggaggaggccaagcagctggtggacaaggcctacaaggagcggcgggaaagcatcaagcagcggcttcgcagcggctcagccagccccatggaactcctatcctacttcaagcagccggtggcagccaccaggacggcggtgagggccgctgactacctgcacgtggctctagacctgctggagaggaagctgcggtccctgtggcgaaggccattcaatgtcactgatgtgctgacgcccgcccagctgaatgtgttgtccaagtcaagcggctgcgcctaccaggacgtgggggtgacttgcccggagcaggacaaataccgcaccatcaccgggatgtgcaacaacagacgcagccccacgctgggggcctccaaccgtgcctttgtgcgctggctgccggcggagtatgaggacggcttctctcttccctacggctggacgcccggggtcaagcgcaacggcttcccggtggctctggctcgcgcggtctccaacgagatcgtgcgcttccccactgatcagctgactccggaccaggagcgctcactcatgttcatgcaatggggccagctgttggaccacgacctcgacttcacccctgagccggccgcccgggcctccttcgtcactggcgtcaactgcgagaccagctgcgttcagcagccgccctgcttcccgctcaagatcccgcccaatgacccccgcatcaagaaccaagccgactgcatcccgttcttccgctcctgcccggcttgccccgggagcaacatcaccatccgcaaccagatcaacgcgctcacttccttcgtggacgccagcatggtgtacggcagcgaggagcccctggccaggaacctgcgcaacatgtccaaccagctggggctgctggccgtcaaccagcgcttccaagacaacggccgggccctgctgccctttgacaacctgcacgatgacccctgtctcctcaccaaccgctcagcgcgcatcccctgcttcctggcaggggacacccgttccagtgagatgcccgagctcacctccatgcacaccctcttacttcgggagcacaaccggctggccacagagctcaagagcctgaaccctaggtgggatggggagaggctctaccaggaagcccggaagatcgtgggggccatggtccagatcatcacttaccgggactacctgcccctggtgctggggccaacggccatgaggaagtacctgcccacgtaccgttcctacaatgactcagtggacccacgcatcgccaacgtcttcaccaatgccttccgctacggccacaccctcatccaacccttcatgttccgcctggacaatcggtaccagcccatggaacccaacccccgtgtccccctcagcagggtcttttttgcctcctggagggtcgtgctggaaggtggcattgaccccatcctccggggcctcatggccacccctgccaagctgaatcgtcagaaccaaattgcagtggatgagatccgggagcgattgtttgagcaggtcatgaggattgggctggacctgcctgctctgaacatgcagcgcagcagggaccacggcctcccaggatacaatgcctggaggcgcttctgtgggctcccgcagcctgaaactgtgggccagctgggcacggtgctgaggaacctgaaattggcgaggaaactgatggagcagtatggcacgcccaacaacatcgacatctggatgggcggcgtgtccgagcctctgaagcgcaaaggccgcgtgggcccactcctcgcctgcatcatcggtacccagttcaggaagctccgggatggtgatcggtgaggaggggttttggtgggagaacgagggtgtgttcagcatgcagcagcgacaggccctggcccagatctcattgccccggatcatctgcgacaacacaggcatcaccaccgtgtctaagaacaacatcttcatgtccaactcatatccccgggactttgtcaactgcagtacacttcctgcattgaacctggcttcctggagggaagcctcctagaggccaggtaagggggtgcagcagtgaggggtatatctgggctggccagttggaaccacggagatctccttgccctagatgagcccagccctgttctgggtgcagctgagaaaatgagtgactagacgttcatttgtgtgctcatgtatgtgcgaagtatataaattggcttttcatgcgtgtgtgttgtctgaacatggggagtgtttcatgggttatgtgtatgtgccatttatgtgagtgtgtgtttgtgctgatgagaatactgagtatgtggaaggcagcagagcggactggtgaggagcacagctcaggaactagactgcctgggttccaatcctggctctgtggcttgctagctatgtgaccttgagcaaattaccctccttaaacaagagttttcttccttgtaaattacatctgtcatggtttcttggagggcccacttgtatcctctggttcttcatttattgagcacctactacatgcaaggcactgtactaggcgtgagaagcatatagaggcaagaaagagataccaagatgccatctgtgtcctggttagcagagctggaccagtggtgccttggagggataagccagctgcagctgggctgtgtggttgacttatgggcccagccagccaggctcaggccatggctcccctttttcttcctcaccctgatttcttgcttattcactgaagttctcctgaagaggaactgggcctgttgccctttctgtaccatttatttgctcccaatgtttatgataataaaggcaccgctgatggggacctcc

SEQ ID NO: 1031 - DNA, 3357 bp, Homo sapiens
tgacaatatcaggtgagctgtggaggtggggtccttggaagctggatgacagcagctggcaaggggataagagagcagtgagcccctccctcaaggaggtctggctttatccatagacagggccctctgaggtggggctgaggtacaaagggggattgagcagcccaggagaagagagatgggggttcccttcttctcttctctcagatgcatggtggacttaggaccttgctgggctgggggtctcactgcagagatgaagctgcttctggccctagcagggctcctggccattctggccacgccccagccctctgaaggtgctgctccagctgtcctgggggaggtggacacctcgttggtgctgagctccatggaggaggccaagcagctggtggacaaggcctacaaggagcggcgggaaaggtggggcacgaggcactgcccagctctgggcaaggatgtcccaggcctttcagagaagcagcaggcagcagggagcttgaaggtgggagagggggactatggggacccatgtggactccctttctgtctgtctgtccctgtcatcaagcagcggcttcgcagcggctcagccagccccatggaactcctatcctacttcaagcagccggtggcagccaccaggacggcggtgagggccgctgactacctgcacgtggctctagacctgctggagaggaagctgcggtccctgtggcgaaggccattcaatgtcactgatgtgctgacgcccgcccagctgaatgtgttgtccaagtcaagcggctgcgcctaccaggacgtgggggtgacttgcccggagcaggacaaataccgcaccatcaccgggatgtgcaacaacagacgcagccccacgctgggggcctccaaccgtgcctttgtgcgctggctgccggcggagtatgaggacggcttctctcttccctacggctggacgcccggggtcaagcgcaacggcttcccggtggctctggctcgcgcggtctccaacgagatcgtgcgcttccccactgatcagctgactccggaccaggagcgctcactcatgttcatgcaatggggccagctgttggaccacgacctcgacttcacccctgagccggccgcccgggcctccttcgtcactggcgtcaactgcgagaccagctgcgttcagcagccgccctgcttcccgctcaagatcccgcccaatgacccccgcatcaagaaccaagccgactgcatcccgttcttccgctcctgcccggcttgccccgggagcaacatcaccatccgcaaccagatcaacgcgctcacttccttcgtggacgccagcatggtgtacggcagcgaggagcccctggccaggaacctgcgcaacatgtccaaccagctggggctgctggccgtcaaccagcgcttccaagacaacggccgggccctgctgccctttgacaacctgcacgatgacccctgtctcctcaccaaccgctcagcgcgcatcccctgcttcctggcaggggacacccgttccagtgagatgcccgagctcacctccatgcacaccctcttacttcgggagcacaaccggctggccacagagctcaagagcctgaaccctaggtgggatggggagaggctctaccaggaagcccggaagatcgtgggggccatggtccagatcatcacttaccgggactacctgcccctggtgctggggccaacggccatgaggaagtacctgcccacgtaccgttcctacaatgactcagtggacccacgcatcgccaacgtcttcaccaatgccttccgctacggccacaccctcatccaacccttcatgttccgcctggacaatcggtaccagcccatggaacccaacccccgtgtccccctcagcagggtcttttttgcctcctggagggtcgtgctggaaggtggcattgaccccatcctccggggcctcatggccacccctgccaagctgaatcgtcagaaccaaattgcagtggatgagatccgggagcgattgtttgagcaggtcatgaggattgggctggacctgcctgctctgaacatgcagcgcagcagggaccacggcctcccaggatacaatgcctggaggcgcttctgtgggctcccgcagcctgaaactgtgggccagctgggcacggtgctgaggaacctgaaattggcgaggaaactgatggagcagtatggcacgcccaacaacatcgacatctggatgggcggcgtgtccgagcctctgaagcgcaaaggccgcgtgggcccactcctcgcctgcatcatcggtacccagttcaggaagctccgggatggtgatcggttttggtgggagaacgagggtgtgttcagcatgcagcagcgacaggccctggcccagatctcattgccccggatcatctgcgacaacacaggcatcaccaccgtgtctaagaacaacatcttcatgtccaactcatatccccgggactttgtcaactgcagtacacttcctgcattgaacctggcttcctggagggaagcctcctagaggccaggtaagggggtgcagcagtgaggggtatatctgggctggccagttggaaccacggagatctccttgccctagatgagcccagccctgttctgggtgcagctgagaaaatgagtgactagacgttcatttgtgtgctcatgtatgtgcgaagtatataaattggcttttcatgcgtgtgtgttgtctgaacatggggagtgtttcatgggttatgtgtatgtgccatttatgtgagtgtgtgtttgtgctgatgagaatactgagtatgtggaaggcagcagagcggactggtgaggagcacagctcaggaactagactgcctgggttccaatcctggctctgtggcttgctagctatgtgaccttgagcaaattaccctccttaaacaagagttttcttccttgtaaattacatctgtcatggtttcttggagggcccacttgtatcctctggttcttcatttattgagcacctactacatgcaaggcactgtactaggcgtgagaagcatatagaggcaagaaagagataccaagatgccatctgtgtcctggttagcagagctggaccagtggtgccttggagggataagccagctgcagctgggctgtgtggttgacttatgggcccagccagccaggctcaggccatggctcccctttttcttcctcaccctgatttcttgcttattcactgaagttctcctgaagaggaactgggcctgttgccctttctgtaccatttatttgctcccaatgtttatgataataaaggcaccgctgatggggacctcc

SEQ ID NO: 1032 - DNA, 3216 bp, Homo sapiens
tgacaatatcaggtgagctgtggaggtggggtccttggaagctggatgacagcagctggcaaggggataagagagcagtgagcccctccctcaaggaggtctggctttatccatagacagggccctctgaggtggggctgaggtacaaagggggattgagcagcccaggagaagagagatgggggttcccttcttctcttctctcagatgcatggtggacttaggaccttgctgggctgggggtctcactgcagagatgaagctgcttctggccctagcagggctcctggccattctggccacgccccagccctctgaaggtgctgctccagctgtcctgggggaggtggacacctcgttggtgctgagctccatggaggaggccaagcagctggtggacaaggcctacaaggagcggcgggaaagcatcaagcagcggcttcgcagcggctcagccagccccatggaactcctatcctacttcaagcagccggtggcagccaccaggacggcggtgagggccgctgactacctgcacgtggctctagacctgctggagaggaagctgcggtccctgtggcgaaggccattcaatgtcactgatgtgctgacgcccgcccagctgaatgtgttgtccaagtcaagcggctgcgcctaccaggacgtgggggtgacttgcccggagcaggacaaataccgcaccatcaccgggatgtgcaacaacagacgcagccccacgctgggggcctccaaccgtgcctttgtgcgctggctgccggcggagtatgaggacggcttctctcttccctacggctggacgcccggggtcaagcgcaacggcttcccggtggctctggctcgcgcggtctccaacgagatcgtgcgcttccccactgatcagctgactccggaccaggagcgctcactcatgttcatgcaatggggccagctgttggaccacgacctcgacttcacccctgagccggccgcccgggcctccttcgtcactggcgtcaactgcgagaccagctgcgttcagcagccgccctgcttcccgctcaagatcccgcccaatgacccccgcatcaagaaccaagccgactgcatcccgttcttccgctcctgcccggcttgccccgggagcaacatcaccatccgcaaccagatcaacgcgctcacttccttcgtggacgccagcatggtgtacggcagcgaggagcccctggccaggaacctgcgcaacatgtccaaccagctggggctgctggccgtcaaccagcgcttccaagacaacggccgggccctgctgccctttgacaacctgcacgatgacccctgtctcctcaccaaccgctcagcgcgcatcccctgcttcctggcaggggacacccgttccagtgagatgcccgagctcacctccatgcacaccctcttacttcgggagcacaaccggctggccacagagctcaagagcctgaaccctaggtgggatggggagaggctctaccaggaagcccggaagatcgtgggggccatggtccagatcatcacttaccgggactacctgcccctggtgctggggccaacggccatgaggaagtacctgcccacgtaccgttcctacaatgactcagtggacccacgcatcgccaacgtcttcaccaatgccttccgctacggccacaccctcatccaacccttcatgttccgcctggacaatcggtaccagcccatggaacccaacccccgtgtccccctcagcagggtcttttttgcctcctggagggtcgtgctggaaggtggcattgaccccatcctccggggcctcatggccacccctgccaagctgaatcgtcagaaccaaattgcagtggatgagatccgggagcgattgtttgagcaggtcatgaggattgggctggacctgcctgctctgaacatgcagcgcagcagggaccacggcctcccaggatacaatgcctggaggcgcttctgtgggctcccgcagcctgaaactgtgggccagctgggcacggtgctgaggaacctgaaattggcgaggaaactgatggagcagtatggcacgcccaacaacatcgacatctggatgggcggcgtgtccgagcctctgaagcgcaaaggccgcgtgggcccactcctcgcctgcatcatcggtacccagttcaggaagctccgggatggtgatcggttttggtgggagaacgagggtgtgttcagcatgcagcagcgacaggccctggcccagatctcattgccccggatcatctgcgacaacacaggcatcaccaccgtgtctaagaacaacatcttcatgtccaactcatatccccgggactttgtcaactgcagtacacttcctgcattgaacctggcttcctggagggaagcctcctagaggccaggtaagggggtgcagcagtgaggggtatatctgggctggccagttggaaccacggagatctccttgccctagatgagcccagccctgttctgggtgcagctgagaaaatgagtgactagacgttcatttgtgtgctcatgtatgtgcgaagtatataaattggcttttcatgcgtgtgtgttgtctgaacatggggagtgtttcatgggttatgtgtatgtgccatttatgtgagtgtgtgtttgtgctgatgagaatactgagtatgtggaaggcagcagagcggactggtgaggagcacagctcaggaactagactgcctgggttccaatcctggctctgtggcttgctagctatgtgaccttgagcaaattaccctccttaaacaagagttttcttccttgtaaattacatctgtcatggtttcttggagggcccacttgtatcctctggttcttcatttattgagcacctactacatgcaaggcactgtactaggcgtgagaagcatatagaggcaagaaagagataccaagatgccatctgtgtcctggttagcagagctggaccagtggtgccttggagggataagccagctgcagctgggctgtgtggttgacttatgggcccagccagccaggctcaggccatggctcccctttttcttcctcaccctgatttcttgcttattcactgaagttctcctgaagaggaactgggcctgttgccctttctgtaccatttatttgctcccaatgtttatgataataaaggcaccgctgatggggacctcc

SEQ ID NO: 1033 - DNA, 2238 bp, Homo sapiens
atgggggttcccttcttctcttctctcagatgcatggtggacttaggaccttgctgggctgggggtctcactgcagagatgaagctgcttctggccctagcagggctcctggccattctggccacgccccagccctctgaaggtgctgctccagctgtcctgggggaggtggacacctcgttggtgctgagctccatggaggaggccaagcagctggtggacaaggcctacaaggagcggcgggaaagcatcaagcagcggcttcgcagcggctcagccagccccatggaactcctatcctacttcaagcagccggtggcagccaccaggacggcggtgagggccgctgactacctgcacgtggctctagacctgctggagaggaagctgcggtccctgtggcgaaggccattcaatgtcactgatgtgctgacgcccgcccagctgaatgtgttgtccaagtcaagcggctgcgcctaccaggacgtgggggtgacttgcccggagcaggacaaataccgcaccatcaccgggatgtgcaacaacagacgcagccccacgctgggggcctccaaccgtgcctttgtgcgctggctgccggcggagtatgaggacggcttctctcttccctacggctggacgcccggggtcaagcgcaacggcttcccggtggctctggctcgcgcggtctccaacgagatcgtgcgcttccccactgatcagctgactccggaccaggagcgctcactcatgttcatgcaatggggccagctgttggaccacgacctcgacttcacccctgagccggccgcccgggcctccttcgtcactggcgtcaactgcgagaccagctgcgttcagcagccgccctgcttcccgctcaagatcccgcccaatgacccccgcatcaagaaccaagccgactgcatcccgttcttccgctcctgcccggcttgccccgggagcaacatcaccatccgcaaccagatcaacgcgctcacttccttcgtggacgccagcatggtgtacggcagcgaggagcccctggccaggaacctgcgcaacatgtccaaccagctggggctgctggccgtcaaccagcgcttccaagacaacggccgggccctgctgccctttgacaacctgcacgatgacccctgtctcctcaccaaccgctcagcgcgcatcccctgcttcctggcaggggacacccgttccagtgagatgcccgagctcacctccatgcacaccctcttacttcgggagcacaaccggctggccacagagctcaagagcctgaaccctaggtgggatggggagaggctctaccaggaagcccggaagatcgtgggggccatggtccagatcatcacttaccgggactacctgcccctggtgctggggccaacggccatgaggaagtacctgcccacgtaccgttcctacaatgactcagtggacccacgcatcgccaacgtcttcaccaatgccttccgctacggccacaccctcatccaacccttcatgttccgcctggacaatcggtaccagcccatggaacccaacccccgtgtccccctcagcagggtcttttttgcctcctggagggtcgtgctggaaggtggcattgaccccatcctccggggcctcatggccacccctgccaagctgaatcgtcagaaccaaattgcagtggatgagatccgggagcgattgtttgagcaggtcatgaggattgggctggacctgcctgctctgaacatgcagcgcagcagggaccacggcctcccaggatacaatgcctggaggcgcttctgtgggctcccgcagcctgaaactgtgggccagctgggcacggtgctgaggaacctgaaattggcgaggaaactgatggagcagtatggcacgcccaacaacatcgacatctggatgggcggcgtgtccgagcctctgaagcgcaaaggccgcgtgggcccactcctcgcctgcatcatcggtacccagttcaggaagctccgggatggtgatcggttttggtgggagaacgagggtgtgttcagcatgcagcagcgacaggccctggcccagatctcattgccccggatcatctgcgacaacacaggcatcaccaccgtgtctaagaacaacatcttcatgtccaactcatatccccgggactttgtcaactgcagtacacttcctgcattgaacctggcttcctggagggaagcctcctag

SEQ ID NO: 1034 - DNA, 2081 bp, Homo sapiens
aattcctcggctcctggcgggagtgccggtggcgccccgcagtccgcttgtccgtccttccctctctgactctcctaccccgggcctgtctctgcagaggtcaggggaggcgggggcccagcacacgtccccagtggcagcgggagcggcagctacgggttcgcggagcccccgaccccccaagggctagaggagcgctcggcggaccaaagaaagcccgcgagcggctgcgcgcccaccaataggtgcggggctcggagccgcgcagcctgcgccgtccctccctccgcccccgccccgccgccgccgccgccgccgcctccccctcctcctgctcctgccttggctcctccgccgcgcgtctcgcactccgagagccgcagcggcagcggcgcgtcctgcctgcagagagccaggccggagaagccgagcggcgcagaggacgccagggcgcgcgccgcagccacccaccctccggaccgcggcagctgctgacccgccatcgccatggcccgcgggaaagccaaggaggagggcagctggaagaaattcatctggaactcagagaagaaggagtttctgggcaggaccggtggcagttggtttaagatccttctattctacgtaatattttatggctgcctggctggcatcttcatcggaaccatccaagtgatgctgctcaccatcagtgaatttaagcccacatatcaggaccgagtggccccgccaggattaacacagattcctcagatccagaagactgaaatttcctttcgtcctaatgatcccaagagctatgaggcatatgtactgaacatagttaggttcctggaaaagtacaaagattcagcccagagggatgacatgatttttgaagattgtggcgatgtgcccagtgaaccgaaagaacgaggagactttaatcatgaacgaggagagcgaaaggtctgcagattcaagcttgaatggctgggaaattgctctggattaaatgatgaaacttatggctacaaagagggcaaaccgtgcattattataaagctcaaccgagttctaggcttcaaacctaaggcaacctcccaagaatgagtccttggagacttacccagtgatgaagtataacccaaatgtccttcccgttcagtgcactggcaagcgagatgaagataaggataaagttggaaatgtggagtattttggactgggcaactcccctggttttcctctgcagtattatccgtactatggcaaactcctgcagcccaaatacctgcagcccctgctggccgtacagttcaccaatcttaccatggacactgaaattcgcatagagtgtaaggcgtacggtgagaacattgggtacagtgagaaagaccgttttcagggacgttttgatgtaaaaattgaagttaagagctgatcacaagcacaaatctttcccactagccatttaataagttaaaaaaagatacaaaaacaaaaacctactagtcttgaacaaactgtcatacgtatgggacctacacttaatctatatgctttacactagctttctgcatttaataggttagaatgtaaattaaagtgtagcaatagcaacaaaatatttattctactgtaaatgacaaaagaaaaagaaaaattgagccttgggacgtgcccatttttactgtaaattatgattccgtaactgacttgtagtaagcagtgtttctggcccctaagtattgctgccttgtgtattttatttagtgtacagtactacaggtgcatactctggtcatttttcaagccatgttttattgtatctgttttctactttatgtgagcaaggtttgctgtccaaggtgtaaatattcaacgggaataaaactggcatggtaatttttttttttttttttttttttgttttttggaactgccctttaaattttaagtgacactacagaaaaacacaaaaaggtgatgggttgtgttatgcttgtattgaatgctgtcttgacatctcttgccttgtcctccggtatgttctaaagctgtgtctgagatctggatctgcccatcactttggctagtga

SEQ ID NO: 1035 - DNA, 2587 bp, Homo sapiens
aattcctcggctcctggcgggagtgccggtggcgccccgcagtccgcttgtccgtccttccctctctgactctcctaccccgggcctgtctctgcagaggtcaggggaggcgggggcccagcacacgtccccagtggcagcgggagcggcagctacgggttcgcggagcccccgaccccccaagggctagaggagcgctcggcggaccaaagaaagcccgcgagcggctgcgcgcccaccaataggtgcggggctcggagccgcgcagcctgcgccgtccctccctccgcccccgccccgccgccgccgccgccgccgcctccccctcctcctgctcctgccttggctcctccgccgcgcgtctcgcactccgagagccgcagcggcagcggcgcgtcctgcctgcagagagccaggccggagaagccgagcggcgcagaggacgccagggcgcgcgccgcagccacccaccctccggaccgcggcagctgctgacccgccatcgccatggcccgcgggaaagccaaggaggagggcagctggaagaaattcatctggaactcagagaagaaggagtttctgggcaggaccggtggcagttggtttaagatccttctattctacgtaatattttatggctgcctggctggcatcttcatcggaaccatccaagtgatgctgctcaccatcagtgaatttaagcccacatatcaggaccgagtggccccgccaggattaacacagattcctcagatccagaagactgaaatttcctttcgtcctaatgatcccaagagctatgaggcatatgtactgaacatagttaggttcctggaaaagtacaaagattcagcccagagggatgacatgatttttgaagattgtggcgatgtgcccagtgaaccgaaagaacgaggagactttaatcatgaacgaggagagcgaaaggtctgcagattcaagcttgaatggctgggaaattgctctggattaaatgatgaaacttatggctacaaagagggcaaaccgtgcattattataaagctcaaccgagttctaggcttcaaacctaagcctcccaagaatgagtccttggagacttacccagtgatgaagtataacccaaatgtccttcccgttcagtgcactggcaagcgagatgaagataaggataaagttggaaatgtggagtattttggactgggcaactcccctggttttcctctgcagtattatccgtactatggcaaactcctgcagcccaaatacctgcagcccctgctggccgtacagttcaccaatcttaccatggacactgaaattcgcatagagtgtaaggcgtacggtgagaacattgggtacagtgagaaagaccgttttcagggacgttttgatgtaaaaattgaagttaagagctgatcacaagcacaaatctttcccactagccatttaataagttaaaaaaagatacaaaaacaaaaacctactagtcttgaacaaactgtcatacgtatgggacctacacttaatctatatgctttacactagctttctgcatttaataggttagaatgtaaattaaagtgtagcaatagcaacaaaatatttattctactgtaaatgacaaaagaaaaagaaaaattgagccttgggacgtgcccatttttactgtaaattatgattccgtaactgacttgtagtaagcagtgtttctggcccctaagtattgctgccttgtgtattttatttagtgtacagtactacaggtgcatactctggtcatttttcaagccatgttttattgtatctgttttctactttatgtgagcaaggtttgctgtccaaggtgtaaatattcaacgggaataaaactggcatggtaatttttttttttttttttttttttgttttttggctctttcaaaggtaatggcccatcgatgagcatttttaacatactccatagtcttttcctgtggtgttaggtctttatttttatttttttcctgggggctggggtgggggtttgtcatgggggaactgccctttaaattttaagtgacactacagaaaaacacaaaaaggtgatgggttgtgttatgcttgtattgaatgctgtcttgacatctcttgccttgtcctccggtatgttctaaagctgtgtctgagatctggatctgcccatcactttggctagtgacagggctaattaatttgctttatacattttcttttactttccttttttcctttctggaggcatcacatgctggtgctgtgtctttatgaatgttttaaccattttcatggtggaagaattttatatttatgcagttgtacaattttatttttttctgcaagaaaaagtgtaatgtatgaaataaaccaaagtcacttgtttgaaaataaatctttattttgaactttataaaaagcaatgcagtaccccatagactggtgttaaatgttgtctacagtgcaaaatccatgttctaacatatgtaataattgccaggagtacagtgctcttgttgatcttgtattcagtcaggttaaaacaacggacaataaaagaatgaacacattc

SEQ ID NO: 1036 - DNA, 1221 bp, Homo sapiens
agaagccgagcggcgcagaggacgccagggcgcgcgccgcagccacccaccctccggaccgcggcagctgctgacccgccatcgccatggcccgcgggaaagccaaggaggagggcagctggaagaaattcatctggaactcagagaagaaggagtttctgggcaggaccggtggcagttggtttaagatccttctattctacgtaatattttatggctgcctggctggcatcttcatcggaaccatccaagtgatgctgctcaccatcagtgaatttaagcccacatatcaggaccgagtggccccgccaggattaacacagattcctcagatccagaagactgaaatttcctttcgtcctaatgatcccaagagctatgaggcatatgtactgaacatagttaggttcctggaaaagtacaaagattcagcccagagggatgacatgatttttgaagattgtggcgatgtgcccagtgaaccgaaagaacgaggagactttaatcatgaacgaggagagcgaaaggtctgcagattcaagcttgaatggctgggaaattgctctggattaaatgatgaaacttatggctacaaagagggcaaaccgtgcattattataaagctcaaccgagttctaggcttcaaacctaagcctcccaagaatgagtccttggagacttacccagtgatgaagtataacccaaatgtccttcccgttcagtgcactggcaagcgagatgaagataaggataaagttggaaatgtggagtattttggactgggcaactcccctggttttcctctgcagtattatccgtactatggcaaactcctgcagcccaaatacctgcagcccctgctggccgtacagttcaccaatcttaccatggacactgaaattcgcatagagtgtaaggcgtacggtgagaacattgggtacagtgagaaagaccgttttcagggacgttttgatgtaaaaattgaagttaagagctgatcacaagcacaaatctttcccactagccatttaataagttaaaaaaagatacaaaaacaaaaacctactagtcttgaacaaactgtcatacgtatgggacctacacttaatctatatgctttacactagctttctgcatttaataggttagaatgtaaattaaagtgtagcaatagcaacaaaatatttattctactgtaaatgacaaaaaaaaaaaaaaaaa

SEQ ID NO: 1037 - DNA, 2635 bp, Homo sapiens
cgcgcgcaccacaacgcccccgccccgccgcccggaaccagctgagcgcagctggacccagcagccgctgtctccagtgccgcagcagcaggtagtgctcatagctctctttgtccagtgcttcggccttggtcccagcgccttcccacggagcagcactcttcaccctgcacagccttgttagcccaacagcatggtggtggaacaccccgagttcctcaaggcagggaaggagcctggcctgcagatctggcgtgtggagaagttcgatctggtgcccgtgcccaccaacctttatggagacttcttcacgggcgacgcctacgtcatcctgaagacagtgcagctgaggaacggaaatctgcagtatgacctccactactggctgggcaatgagtgcagccaggatgagagcggggcggccgccatctttaccgtgcagctggatgactacctgaacggccgggccgtgcagcaccgtgaggtccagggcttcgagtcggccaccttcctaggctacttcaagtctggcctgaagtacaagaaaggaggtgtggcatcaggattcaagcacgtggtacccaacgaggtggtggtgcagagactcttccaggtcaaagggcggcgtgtggtccgtgccaccgaggtacctgtgtcctgggagagcttcaacaatggcgactgcttcatcctggacctgggcaacaacatccaccagtggtgtggttccaacagcaatcggtatgaaagactgaaggccacacaggtgtccaagggcatccgggacaacgagcggagtggccgggcccgagtgcacgtgtctgaggagggcactgagcccgaggcgatgctccaggtgctgggccccaagccggctctgcctgcaggtaccgaggacaccgccaaggaggatgcggccaaccgcaagctggccaagctctacaaggtctccaatggtgcagggaccatgtccgtctccctcgtggctgatgagaaccccttcgcccagggggccctgaagtcagaggactgcttcatcctggaccacggcaaagatgggaaaatctttgtctggaaaggcaagcaggcaaacacggaggagaggaaggctgccctcaaaacagcctctgacttcatcaccaagatggactaccccaagcagactcaggtctcggtccttcctgagggcggtgagaccccactgttcaagcagttcttcaagaactggcgggacccagaccagacagatggcctgggcttgtcctacctttccagccatatcgccaacgtggagcgggtgcccttcgacgccgccaccctgcacacctccactgccatggccgcccagcacggcatggatgacgatggcacaggccagaaacagatctggagaatcgaaggttccaacaaggtgcccgtggaccctgccacatatggacagttctatggaggcgacagctacatcattctgtacaactaccgccatggtggccgccaggggcagataatctataactggcagggtgcccagtctacccaggatgaggtcgctgcatctgccatcctgactgctcagctggatgaggagctgggaggtacccctgtccagagccgtgtggtccaaggcaaggagcccgcccacctcatgagcctgtttggtgggaagcccatgatcatctacaagggcggcacctcccgcgagggcgggcagacagcccctgccagcacccgcctcttccaggtccgcgccaacagcgctggagccacccgggctgttgaggtattgcctaaggctggtgcactgaactccaacgatgcctttgttctgaaaaccccctcagccgcctacctgtgggtgggtacaggagccagcgaggcagagaagacgggggcccaggagctgctcagggtgctgcgggcccaacctgtgcaggtggcagaaggcagcgagccagatggcttctgggaggccctgggcgggaaggctgcctaccgcacatccccacggctgaaggacaagaagatggatgcccatcctcctcgcctctttgcctgctccaacaagattggacgttttgtgatcgaagaggttcctggtgagctcatgcaggaagacctggcaacggatgacgtcatgcttctggacacctgggaccaggtctttgtctgggttggaaaggattctcaagaagaagaaaagacagaagccttgacttctgctaagcggtacatcgagacggacccagccaatcgggatcggcggacgcccatcaccgtggtgaagcaaggctttgagcctccctcctttgtgggctggttccttggctgggatgatgattactggtctgtggaccccttggacagggccatggctgagctggctgcctgaggaggggcagggcccacccatgtcaccggtcagtgccttttggaactgtccttccctcaaagaggccttagagcgagcagagcagctctgctatgagtgtgtgtgtgtgtgtgtgttgtttcttttttttttttttacagtatccaaaaatagccctgcaaaaattcagagtccttgcaaaattgtctaaaatgtcagtgtttgggaaattaaatccaataaaaacattttgaagtgtgtactcta

SEQ ID NO: 1038 - DNA, 2658 bp, Homo sapiens
cgcgcgcaccacaacgcccccgccccgccgcccggaaccagctgagcgcagctggacccagcagccgctgtctccagtgccgcagcagcaggtagtgctcatagctctctttgtccagtgcttcggccttggtcccagcgccttcccacggagcagcactcttcaccctgcacagccttgttagcccaacagcatggtggtggaacaccccgagttcctcaaggcagggaaggagcctggcctgcagatctggcgtgtggagaagttcgatctggtgcccgtgcccaccaacctttatggagacttcttcacgggcgacgcctacgtcatcctgaagacagtgcagctgaggaacggaaatctgcagtatgacctccactactggctgggcaatgagtgcagccaggatgagagcggggcggccgccatctttaccgtgcagctggatgactacctgaacggccgggccgtgcagcaccgtgaggtccagggcttcgagtcggccaccttcctaggctacttcaagtctggcctgaagtacaagaaaggaggtgtggcatcaggattcaagcacgtggtacccaacgaggtggtggtgcagagactcttccaggtcaaagggcggcgtgtggtccgtgccaccgaggtacctgtgtcctgggagagcttcaacaatggcgactgcttcatcctggacctgggcaacaacatccaccagtggtgtggttccaacagcaatcggtatgaaagactgaaggccacacaggtgtccaagggcatccgggacaacgagcggagtggccgggcccgagtgcacgtgtctgaggagggcactgagcccgaggcgatgctccaggtgctgggccccaagccggctctgcctgcaggtaccgaggacaccgccaaggaggatgcggccaaccgcaagctggccaagctctacaaggtctccaatggtgcagggaccatgtccgtctccctcgtggctgatgagaaccccttcgcccagggggccctgaagtcagaggactgcttcatcctggaccacggcaaagatgggaaaatctttgtctggaaaggcaagcaggcaaacacggaggagaggaaggctgccctcaaaacagcctctgacttcatcaccaagatggactaccccaagcagactcaggtctcggtccttcctgagggcggtgagaccccactgttcaagcagttcttcaagaactggcgggacccagaccagacagatggcctgggcttgtcctacctttccagccatatcgccaacgtggagcgggtgcccttcgacgccgccaccctgcacacctccactgccatggccgcccagcacggcatggatgacgatggcacaggccagaaacagatctggagaatcgaaggttccaacaaggtgcccgtggaccctgccacatatggacagttctatggaggcgacagctacatcattctgtacaactaccgccatggtggccgccaggggcagataatctataactggcagggtgcccagtctacccaggatgaggtcgctgcatctgccatcctgactgctcagctggatgaggagctgggaggtacccctgtccagagccgtgtggtccaaggcaaggagcccgcccacctcatgagcctgtttggtgggaagcccatgatcatctacaagggcggcacctcccgcgagggcgggcagacagcccctgccagcacccgcctcttccaggtccgcgccaacagcgctggagccacccgggctgttgaggtattgcctaaggctggtgcactgaactccaacgatgcctttgttctgaaaaccccctcagccgcctacctgtgggtgggtacaggagccagcgaggcagagaagacgggggcccaggagctgctcagggtgctgcgggcccaacctgtgcaggtggcagaaggcagcgagccagatggcttctgggaggccctgggcgggaaggctgcctaccgcacatccccacggctgaaggacaagaagatggatgcccatcctcctcgcctctttgcctgctccaacaagattggacgttttgtgatcgaagaggttcctggtgagctcatgcaggaagacctggcaacggatgacgtcatgcttctggacacctgggaccaggtctttgtctgggttggaaaggattctcaagaagaagaaaagacagaagccttgacttctgctaagcggtacatcgagacggacccagccaatcgggatcggcggacgcccatcaccgtggtgaagcaaggctttgagcctccctcctttgtgggctggttccttggctgggatgatgattactggtctgtggaccccttggacagggccatggctgagctggctgcctgaggaggggcagggcccacccatgtcaccggtcagtgccttttggaactgtccttccctcaaagaggccttagagcgagcagagcagctctgctatgagtgtgtgtgtgtgtgtgtgttgtttcttttttttttttttacagtatccaaaaatagccctgcaaaaattcagagtccttgcaaaattgtctaaaatgtcagtgtttgggaaattaaatccaataaaaacattttgaagtgtgaaaaaaaaaaaaaaaaaaaaaaaaaaaaaa

SEQ ID NO: 1039 - DNA, 2706 bp, Homo sapiens
cgcgcgcaccacaacgcccccgccccgccgcccggaaccagctgagcgcagctggacccagcagccgctgtctccagtgccgcagcagcaggtagtgctcatagctctctttgtccagtgcttcggccttggtcccagcgccttcccacggagcagcactcttcaccctgcacagccttgttagttcttgcagatacagcgctaggaaaaggggagtaattcaggtctagaatggaaaaactgttttgttgctttcccaacagcatggtggtggaacaccccgagttcctcaaggcagggaaggagcctggcctgcagatctggcgtgtggagaagttcgatctggtgcccgtgcccaccaacctttatggagacttcttcacgggcgacgcctacgtcatcctgaagacagtgcagctgaggaacggaaatctgcagtatgacctccactactggctgggcaatgagtgcagccaggatgagagcggggcggccgccatctttaccgtgcagctggatgactacctgaacggccgggccgtgcagcaccgtgaggtccagggcttcgagtcggccaccttcctaggctacttcaagtctggcctgaagtacaagaaaggaggtgtggcatcaggattcaagcacgtggtacccaacgaggtggtggtgcagagactcttccaggtcaaagggcggcgtgtggtccgtgccaccgaggtacctgtgtcctgggagagcttcaacaatggcgactgcttcatcctggacctgggcaacaacatccaccagtggtgtggttccaacagcaatcggtatgaaagactgaaggccacacaggtgtccaagggcatccgggacaacgagcggagtggccgggcccgagtgcacgtgtctgaggagggcactgagcccgaggcgatgctccaggtgctgggccccaagccggctctgcctgcaggtaccgaggacaccgccaaggaggatgcggccaaccgcaagctggccaagctctacaaggtctccaatggtgcagggaccatgtccgtctccctcgtggctgatgagaaccccttcgcccagggggccctgaagtcagaggactgcttcatcctggaccacggcaaagatgggaaaatctttgtctggaaaggcaagcaggcaaacacggaggagaggaaggctgccctcaaaacagcctctgacttcatcaccaagatggactaccccaagcagactcaggtctcggtccttcctgagggcggtgagaccccactgttcaagcagttcttcaagaactggcgggacccagaccagacagatggcctgggcttgtcctacctttccagccatatcgccaacgtggagcgggtgcccttcgacgccgccaccctgcacacctccactgccatggccgcccagcacggcatggatgacgatggcacaggccagaaacagatctggagaatcgaaggttccaacaaggtgcccgtggaccctgccacatatggacagttctatggaggcgacagctacatcattctgtacaactaccgccatggtggccgccaggggcagataatctataactggcagggtgcccagtctacccaggatgaggtcgctgcatctgccatcctgactgctcagctggatgaggagctgggaggtacccctgtccagagccgtgtggtccaaggcaaggagcccgcccacctcatgagcctgtttggtgggaagcccatgatcatctacaagggcggcacctcccgcgagggcgggcagacagcccctgccagcacccgcctcttccaggtccgcgccaacagcgctggagccacccgggctgttgaggtattgcctaaggctggtgcactgaactccaacgatgcctttgttctgaaaaccccctcagccgcctacctgtgggtgggtacaggagccagcgaggcagagaagacgggggcccaggagctgctcagggtgctgcgggcccaacctgtgcaggtggcagaaggcagcgagccagatggcttctgggaggccctgggcgggaaggctgcctaccgcacatccccacggctgaaggacaagaagatggatgcccatcctcctcgcctctttgcctgctccaacaagattggacgttttgtgatcgaagaggttcctggtgagctcatgcaggaagacctggcaacggatgacgtcatgcttctggacacctgggaccaggtctttgtctgggttggaaaggattctcaagaagaagaaaagacagaagccttgacttctgctaagcggtacatcgagacggacccagccaatcgggatcggcggacgcccatcaccgtggtgaagcaaggctttgagcctccctcctttgtgggctggttccttggctgggatgatgattactggtctgtggaccccttggacagggccatggctgagctggctgcctgaggaggggcagggcccacccatgtcaccggtcagtgccttttggaactgtccttccctcaaagaggccttagagcgagcagagcagctctgctatgagtgtgtgtgtgtgtgtgtgttgtttcttttttttttttttacagtatccaaaaatagccctgcaaaaattcagagtccttgcaaaattgtctaaaatgtcagtgtttgggaaattaaatccaataaaaacattttgaagtgtgtactcta

SEQ ID NO: 1040 - DNA, 2670 bp, Homo sapiens
atgggcgggcggctacttaaggtcggcgacccgaggccgcggctgccgactgggtcccctgccgctgtcgccaccatggctccgcaccgccccgcgcccgcgctgctttgcgcgctgtccctggcgctgtgcgcgctgtcgctgcccgtccgcgcggccactgcgtcgcggggggcgtcccaggcgggggcgccccaggggcgggtgcccgaggcgcggcccaacagcatggtggtggaacaccccgagttcctcaaggcagggaaggagcctggcctgcagatctggcgtgtggagaagttcgatctggtgcccgtgcccaccaacctttatggagacttcttcacgggcgacgcctacgtcatcctgaagacagtgcagctgaggaacggaaatctgcagtatgacctccactactggctgggcaatgagtgcagccaggatgagagcggggcggccgccatctttaccgtgcagctggatgactacctgaacggccgggccgtgcagcaccgtgaggtccagggcttcgagtcggccaccttcctaggctacttcaagtctggcctgaagtacaagaaaggaggtgtggcatcaggattcaagcacgtggtacccaacgaggtggtggtgcagagactcttccaggtcaaagggcggcgtgtggtccgtgccaccgaggtacctgtgtcctgggagagcttcaacaatggcgactgcttcatcctggacctgggcaacaacatccaccagtggtgtggttccaacagcaatcggtatgaaagactgaaggccacacaggtgtccaagggcatccgggacaacgagcggagtggccgggcccgagtgcacgtgtctgaggagggcactgagcccgaggcgatgctccaggtgctgggccccaagccggctctgcctgcaggtaccgaggacaccgccaaggaggatgcggccaaccgcaagctggccaagctctacaaggtctccaatggtgcagggaccatgtccgtctccctcgtggctgatgagaaccccttcgcccagggggccctgaagtcagaggactgcttcatcctggaccacggcaaagatgggaaaatctttgtctggaaaggcaagcaggcaaacacggaggagaggaaggctgccctcaaaacagcctctgacttcatcaccaagatggactaccccaagcagactcaggtctcggtccttcctgagggcggtgagaccccactgttcaagcagttcttcaagaactggcgggacccagaccagacagatggcctgggcttgtcctacctttccagccatatcgccaacgtggagcgggtgcccttcgacgccgccaccctgcacacctccactgccatggccgcccagcacggcatggatgacgatggcacaggccagaaacagatctggagaatcgaaggttccaacaaggtgcccgtggaccctgccacatatggacagttctatggaggcgacagctacatcattctgtacaactaccgccatggtggccgccaggggcagataatctataactggcagggtgcccagtctacccaggatgaggtcgctgcatctgccatcctgactgctcagctggatgaggagctgggaggtacccctgtccagagccgtgtggtccaaggcaaggagcccgcccacctcatgagcctgtttggtgggaagcccatgatcatctacaagggcggcacctcccgcgagggcgggcagacagcccctgccagcacccgcctcttccaggtccgcgccaacagcgctggagccacccgggctgttgaggtattgcctaaggctggtgcactgaactccaacgatgcctttgttctgaaaaccccctcagccgcctacctgtgggtgggtacaggagccagcgaggcagagaagacgggggcccaggagctgctcagggtgctgcgggcccaacctgtgcaggtggcagaaggcagcgagccagatggcttctgggaggccctgggcgggaaggctgcctaccgcacatccccacggctgaaggacaagaagatggatgcccatcctcctcgcctctttgcctgctccaacaagattggacgttttgtgatcgaagaggttcctggtgagctcatgcaggaagacctggcaacggatgacgtcatgcttctggacacctgggaccaggtctttgtctgggttggaaaggattctcaagaagaagaaaagacagaagccttgacttctgctaagcggtacatcgagacggacccagccaatcgggatcggcggacgcccatcaccgtggtgaagcaaggctttgagcctccctcctttgtgggctggttccttggctgggatgatgattactggtctgtggaccccttggacagggccatggctgagctggctgcctgaggaggggcagggcccacccatgtcaccggtcagtgccttttggaactgtccttccctcaaagaggccttagagcgagcagagcagctctgctatgagtgtgtgtgtgtgtgtgtgttgtttcttttttttttttttacagtatccaaaaatagccctgcaaaaattcagagtccttgcaaaattgtctaaaatgtcagtgtttgggaaattaaatccaataaaaacattttgaagtgtgtactcta

SEQ ID NO: 1041 - DNA, 2663 bp, Homo sapiens
ccaccatggctccgcaccgccccgcgcccgcgctgctttgcgcgctgtccctggcgctgtgcgcgctgtcgctgcccgtccgcgcggccactgcgtcgcggggggcgtcccaggcgggggcgccccaggggcgggtgcccgaggcgcggcccaacagcatggtggtggaacaccccgagttcctcaaggcagggaaggagcctggcctgcagatctggcgtgtggagaagttcgatctggtgcccgtgcccaccaacctttatggagacttcttcacgggcgacgcctacgtcatcctgaagacagtgcagctgaggaacggaaatctgcagtatgacctccactactggctgggcaatgagtgcagccaggatgagagcggggcggccgccatctttaccgtgcagctggatgactacctgaacggccgggccgtgcagcaccgtgaggtccagggcttcgagtcggccaccttcctaggctacttcaagtctggcctgaagtacaagaaaggaggtgtggcatcaggattcaagcacgtggtacccaacgaggtggtggtgcagagactcttccaggtcaaagggcggcgtgtggtccgtgccaccgaggtacctgtgtcctgggagagcttcaacaatggcgactgcttcatcctggacctgggcaacaacatccaccagtggtgtggttccaacagcaatcggtatgaaagactgaaggccacacaggtgtccaagggcatccgggacaacgagcggagtggccgggcccgagtgcacgtgtctgaggagggcactgagcccgaggcgatgctccaggtgctgggccccaagccggctctgcctgcaggtaccgaggacaccgccaaggaggatgcggccaaccgcaagctggccaagctctacaaggtctccaatggtgcagggaccatgtccgtctccctcgtggctgatgagaaccccttcgcccagggggccctgaagtcagaggactgcttcatcctggaccacggcaaagatgggaaaatctttgtctggaaaggcaagcaggcaaacacggaggagaggaaggctgccctcaaaacagcctctgacttcatcaccaagatggactaccccaagcagactcaggtctcggtccttcctgagggcggtgagaccccactgttcaagcagttcttcaagaactggcgggacccagaccagacagatggcctgggcttgtcctacctttccagccatatcgccaacgtggagcgggtgcccttcgacgccgccaccctgcacacctccactgccatggccgcccagcacggcatggatgacgatggcacaggccagaaacagatctggagaatcgaaggttccaacaaggtgcccgtggaccctgccacatatggacagttctatggaggcgacagctacatcattctgtacaactaccgccatggtggccgccaggggcagataatctataactggcagggtgcccagtctacccaggatgaggtcgctgcatctgccatcctgactgctcagctggatgaggagctgggaggtacccctgtccagagccgtgtggtccaaggcaaggagcccgcccacctcatgagcctgtttggtgggaagcccatgatcatctacaagggcggcacctcccgcgagggcgggcagacagcccctgccagcacccgcctcttccaggtccgcgccaacagcgctggagccacccgggctgttgaggtattgcctaaggctggtgcactgaactccaacgatgcctttgttctgaaaaccccctcagccgcctacctgtgggtgggtacaggagccagcgaggcagagaagacgggggcccaggagctgctcagggtgctgcgggcccaacctgtgcaggtggcagaaggcagcgagccagatggcttctgggaggccctgggcgggaaggctgcctaccgcacatccccacggctgaaggacaagaagatggatgcccatcctcctcgcctctttgcctgctccaacaagattggacgttttgtgatcgaagaggttcctggtgagctcatgcaggaagacctggcaacggatgacgtcatgcttctggacacctgggaccaggtctttgtctgggttggaaaggattctcaagaagaagaaaagacagaagccttgacttctgctaagcggtacatcgagacggacccagccaatcgggatcggcggacgcccatcaccgtggtgaagcaaggctttgagcctccctcctttgtgggctggttccttggctgggatgatgattactggtctgtggaccccttggacagggccatggctgagctggctgcctgaggaggggcagggcccacccatgtcaccggtcagtgccttttggaactgtccttccctcaaagaggccttagagcgagcagagcagctctgctatgagtgtgtgtgtgtgtgtgtgttgtttcttttttttttttttacagtatccaaaaatagccctgcaaaaattcagagtccttgcaaaattgtctaaaatgtcagtgtttgggaaattaaatccaataaaaacattttgaagtgtgaaaaaaaaaaaaaaaaaaaaaaaaaaaaaaaaaaaaaaaaaaaaaaaaaaaaaaaaaaaaaaaaaaaaaa

SEQ ID NO: 1042 - DNA, 3701 bp, Homo sapiens
cccagtctcccggccacggttgaaaccagacgtgcagtggggctgacccctgtgccccaccccagagtcatgccagcgtgggtggtggggcattctctgggatgaatgatctggatcccatagccatctgtgtcctgtttgaggaatgggaccctcaaacagagaacagccaagatgctcaagcagtggtttatctctagggtctccatagcaggggaggtagggtcagactcctgagatggctgatgtcctaccctgcccccaaccaggggccccaggagactcctttttcttactgcaactttggcctcctcagtctgcagatctccaggggagcccaccagcctagtcaacatggcctcggaagacattgccaagctggcagagacacttgccaagactcaggtggccgggggacagctgagtttcaaaggcaagagcctcaaactcaacactgcagaagatgctaaagatgtgattaaagagattgaagactttgacagcttggaggctctgcgtctggaaggcaacacagtgggcgtggaagcagccagggtcatcgccaaggccttagagaagaagtcggagttgaagcgctgccactggagtgacatgttcacgggaaggctgcggaccgagatcccaccagccctgatctcactaggggaaggactcatcacagctggggctcagctggtggagctggacttaagcgacaacgcattcgggcccgacggtgtgcaaggcttcgaggccctgctcaagagctcagcctgcttcaccctgcaggaactcaagctcaacaactgtggcatgggcattggcggcggcaagatcctggctgcagctctgaccgaatgtcaccggaaatccagtgcccaaggcaagcctctggccctgaaggtctttgtggctggcagaaaccgtctggagaatgatggcgccactgccttggcagaagcttttagggtcatcgggaccctggaggaggtccacatgccacagaatgggatcaaccaccctggcatcactgccctggcccaggctttcgctgtcaaccccctgctgcgggtcatcaacctgaatgacaacaccttcactgagaagggcgccgtggccatggccgagaccttgaagaccttgcggcaggtggaggtgattaattttggggactgcctggtgcgctccaagggtgcagttgccattgcagatgccatccgcggcggcctgcccaagctaaaggagctgaacttgtcattctgtgaaatcaagagggatgctgccctggctgttgctgaggccatggcagacaaagctgagctggagaagctggacctgaatggtagcaacaccctgggagaagaaggctgtgaacagcttcaggaggtgctggagggcttcaacatggccaaggtgctggcgtccctcagtgatgacgaggacgaggaggaggaggaggaaggagaagaggaagaagaggaagcagaagaagaggaggaggaagatgaggaagaggaggaagaagaggaggaggaggaggaagaagagcctcagcagcgagggcagggagagaagtcagccacgccctcacggaagattctggaccctaacactggggagccagctcccgtgctgtcctccccacctcctgcagacgtctccaccttcctggcttttccctctccagagaagctgctgcgcctagggcccaagagctccgtgctgatagcccagcagactgacacgtctgaccccgagaaggtggtctctgccttcctaaaggtgtcatctgtgttcaaggacgaagctactgtgaggatggcagtgcaggatgcagtagatgccctgatgcagaaggctttcaactcctcgtccttcaactccaacaccttcctcaccaggctcctcgtgcacatgggtctgctcaagagtgaagacaaggtcaaggccattgccaacctgtacggccccctgatggcgctgaaccacatggtgcagcaggactatttccccaaggcccttgcacccctgctgctggcgttcgtgaccaagcccaacagcgccctggaatcctgctccttcgcccgccacagtctgctgcagacgctgtacaaggtctagactcaaagcctctcccatcccttggcctggaccagtgagctggggagggactcggatgaactgaggcgcagcctacgccattgccttggacaggactctggccacaggcagggcgggtctgtgtcccatgtgtcctgtcagtcccctgagtatgtgtgtgggtgtggcgcatgtgcaggtctgtgcctcctgtcgggatttgggttttaacgtcttctgctggcccagccctgctctgttgtggggagttggcccccaggggaaagggctgtgagctgctccgccattaaactcacctccacctgagggcgctctgctgatctccgcctgggccctgatggccgtccccacccacctgccttccggcccggctccctggcggagccagaacccagggagttgcccgcgtgctgtccttcccctctgtgttgtgattgggttgtttcctgccctgcctggggctgcttctcgtcaccaagccctggtcctgcggcagctgtcacccctaccatccataccactgtgctgaccgctcagcctgaagagcagagaatgccatgggtgggactgtgggggtcggatcgtggggttgttggcagagggcaaccctgggccccacaccgtgtggacaggcagacaccagattgtccaggagcaggagctgctgggactgcgctggccccggacctagtgggccttctcctggctgctgagatgtcgtctgtgactggcctggctggagggggagtgttgacaacccaaagctgttctccagtctggggagggagaggcagggtccccaatgtccgagctgcatctggacgctgctcttaaaggacctcctggggcaggggagcggtagggtctggactgggcagatgctgtatgacctccctgagcacccgtgactgccccatgctttcccctttgtgctctgtgtgtgtctgggctgtgcccgggggcttcacaaataaagtcgtgtggcagcttcagagactcagaaactctcactgaaagcgggatagtctcgggggccgttgtacgtggagtcccacctcggcagagcatgcggccccgcagcagtctgtggggcagtcagccctgcagaagggcccggcctcggcctcaggccactacctgggaagtggcagtcctgagtgggggcccattttcctgcctggccacacctcacccagcaccctgcctttgggctgcagctcgcttggcttctgcgttgctccttcactatggaagccacctcccttgggatcctttgctccactgccacatatgtgaggacagcccagccaaccttccttacctcctaccctacaccatgtatgtgctttgggagcccatgtcccccacaaacggcctccaagaagtccctccaaggtttcttagagggcaatattttctcattggcagtcggccacgtaggtgaccaggtggcagaggatactgctggccctgtcccctgtcttctgtgtgagttgatacggtagggggtgggtgtggggctggcattaagttctgatgccagctacaacgtggatgaactttgaaaacatgttaaatga

SEQ ID NO: 1043 - DNA, 3057 bp, Homo sapiens
gccgcctgtttacggtagagtcagggtccctttcctttccccgtcacctgcctggaacaggggtgcggggcgaggagggcgtggcgcccgtgtgcgccttctgcctgccccctcggccttcttcacttagccttcgacggccgagcgccccaggggtggcggtgggagtggggttgttgagcggcgctggctcctttcacaaatggggaaactgaggcttaaagggcgtctgactcgccagagcagctcagcctgcagctgctagcagtggcgtctcatattagcattgttgtcaaccggaggcggtgcgagtccgccggggattccagatggggctcctgcgccgcccgcctatcatttgcggcctgtattcgcgcgtcgctcccgcagagccacctcccagcaggcccacgcccgcgggggccccgggctggcgccgctgtccctggaatcgattctgcagatctccaggggagcccaccagcctagtcaacatggcctcggaagacattgccaagctggcagagacacttgccaagactcaggtggccgggggacagctgagtttcaaaggcaagagcctcaaactcaacactgcagaagatgctaaagatgtgattaaagagattgaagactttgacagcttggaggctctgcgtctggaaggcaacacagtgggcgtggaagcagccagggtcatcgccaaggccttagagaagaagtcggagttgaagcgctgccactggagtgacatgttcacgggaaggctgcggaccgagatcccaccagccctgatctcactaggggaaggactcatcacagctggggctcagctggtggagctggacttaagcgacaacgcattcgggcccgacggtgtgcaaggcttcgaggccctgctcaagagctcagcctgcttcaccctgcaggaactcaagctcaacaactgtggcatgggcattggcggcggcaagatcctggctgcagctctgaccgaatgtcaccggaaatccagtgcccaaggcaagcctctggccctgaaggtctttgtggctggcagaaaccgtctggagaatgatggcgccactgccttggcagaagcttttagggtcatcgggaccctggaggaggtccacatgccacagaatgggatcaaccaccctggcatcactgccctggcccaggctttcgctgtcaaccccctgctgcgggtcatcaacctgaatgacaacaccttcactgagaagggcgccgtggccatggccgagaccttgaagaccttgcggcaggtggaggtgattaattttggggactgcctggtgcgctccaagggtgcagttgccattgcagatgccatccgcggcggcctgcccaagctaaaggagctgaacttgtcattctgtgaaatcaagagggatgctgccctggctgttgctgaggccatggcagacaaagctgagctggagaagctggacctgaatggcaacaccctgggagaagaaggctgtgaacagcttcaggaggtgctggagggcttcaacatggccaaggtgctggcgtccctcagtgatgacgaggacgaggaggaggaggaggaaggagaagaggaagaagaggaagcagaagaagaggaggaggaagatgaggaagaggaggaagaagaggaggaggaggaggaagaagagcctcagcagcgagggcagggagagaagtcagccacgccctcacggaagattctggaccctaacactggggagccagctcccgtgctgtcctccccacctcctgcagacgtctccaccttcctggcttttccctctccagagaagctgctgcgcctagggcccaagagctccgtgctgatagcccagcagactgacacgtctgaccccgagaaggtggtctctgccttcctaaaggtgtcatctgtgttcaaggacgaagctactgtgaggatggcagtgcaggatgcagtagatgccctgatgcagaaggctttcaactcctcgtccttcaactccaacaccttcctcaccaggctcctcgtgcacatgggtctgctcaagagtgaagacaaggtcaaggccattgccaacctgtacggccccctgatggcgctgaaccacatggtgcagcaggactatttccccaaggcccttgcacccctgctgctggcgttcgtgaccaagcccaacagcgccctggaatcctgctccttcgcccgccacagtctgctgcagacgctgtacaagtctggggagggagaggcagggtccccaatgtccgagctgcatctggacgctgctcttaaaggacctcctggggcaggggagcggtagggtctggactgggcagatgctgtatgacctccctgagcacccgtgactgccccatgctttcccctttgtgctctgtgtgtgtctgggctgtgcccgggggcttcacaaataaagtcgtgtggcagcttcagagactcagaaactctcactgaaagcgggatagtctcgggggccgttgtacgtggagtcccacctcggcagagcatgcggccccgcagcagtctgtggggcagtcagccctgcagaagggcccggcctcggcctcaggccactacctgggaagtggcagtcctgagtgggggcccattttcctgcctggccacacctcacccagcaccctgcctttgggctgcagctcgcttggcttctgcgttgctccttcactatggaagccacctcccttgggatcctttgctccactgccacatatgtgaggacagcccagccaaccttccttacctcctaccctacaccatgtatgtgctttgggagcccatgtcccccacaaacggcctccaagaagtccctccaaggtttcttagagggcaatattttctcattggcagtcggccacgtaggtgaccaggtggcagaggatactgctggccctgtcccctgtcttctgtgtgagttgatacggtagggggtgggtgtggggctggcattaagttctgatgccagctacaacgtggatgaactttgaaaacatgttaaatga

SEQ ID NO: 1044 - DNA, 3875 bp, Homo sapiens
ctgccggctttcaaaatcctcctcctccgccatcatccgccgcggtgcggagagcaggtggtgctggaagcgcgtgaggccgggagctcgagagagctaacagactagccggctggacatctggaccgctggatccggaggtggcgaccccggcctgacccggaccctaaatccgtccccgccccagagggcggaggcgcgcgctcgattccccccacgcggcggcgccgcctgtttacgagacggtctccttctgtcacccaggctggagtgtagtggaacgatcaccgctgaactgcagcgtcggcttcctgggctcaagcgatcctcccacctcaacctcccaagtcatggggactacagatgccatcacacctggctaatttttaaatttttctgtggagacagggtctcattctgttgcccaggcttgtctcgaaccctggtctaaagtgatcttcccgcctagcctcccaaaatgttggaattacagtctgcagatctccaggggagcccaccagcctagtcaacatggcctcggaagacattgccaagctggcagagacacttgccaagactcaggtggccgggggacagctgagtttcaaaggcaagagcctcaaactcaacactgcagaagatgctaaagatgtgattaaagagattgaagactttgacagcttggaggctctgcgtctggaaggcaacacagtgggcgtggaagcagccagggtcatcgccaaggccttagagaagaagtcggagttgaagcgctgccactggagtgacatgttcacgggaaggctgcggaccgagatcccaccagccctgatctcactaggggaaggactcatcacagctggggctcagctggtggagctggacttaagcgacaacgcattcgggcccgacggtgtgcaaggcttcgaggccctgctcaagagctcagcctgcttcaccctgcaggaactcaagctcaacaactgtggcatgggcattggcggcggcaagatcctggctgcagctctgaccgaatgtcaccggaaatccagtgcccaaggcaagcctctggccctgaaggtctttgtggctggcagaaaccgtctggagaatgatggcgccactgccttggcagaagcttttagggtcatcgggaccctggaggaggtccacatgccacagaatgggatcaaccaccctggcatcactgccctggcccaggctttcgctgtcaaccccctgctgcgggtcatcaacctgaatgacaacaccttcactgagaagggcgccgtggccatggccgagaccttgaagaccttgcggcaggtggaggtgattaattttggggactgcctggtgcgctccaagggtgcagttgccattgcagatgccatccgcggcggcctgcccaagctaaaggagctgaacttgtcattctgtgaaatcaagagggatgctgccctggctgttgctgaggccatggcagacaaagctgagctggagaagctggacctgaatggcaacaccctgggagaagaaggctgtgaacagcttcaggaggtgctggagggcttcaacatggccaaggtgctggcgtccctcagtgatgacgaggacgaggaggaggaggaggaaggagaagaggaagaagaggaagcagaagaagaggaggaggaagatgaggaagaggaggaagaagaggaggaggaggaggaagaagagcctcagcagcgagggcagggagagaagtcagccacgccctcacggaagattctggaccctaacactggggagccagctcccgtgctgtcctccccacctcctgcagacgtctccaccttcctggcttttccctctccagagaagctgctgcgcctagggcccaagagctccgtgctgatagcccagcagactgacacgtctgaccccgagaaggtggtctctgccttcctaaaggtgtcatctgtgttcaaggacgaagctactgtgaggatggcagtgcaggatgcagtagatgccctgatgcagaaggctttcaactcctcgtccttcaactccaacaccttcctcaccaggctcctcgtgcacatgggtctgctcaagagtgaagacaaggtcaaggccattgccaacctgtacggccccctgatggcgctgaaccacatggtgcagcaggactatttccccaaggcccttgcacccctgctgctggcgttcgtgaccaagcccaacagcgccctggaatcctgctccttcgcccgccacagtctgctgcagacgctgtacaaggtctagactcaaagcctctcccatcccttggcctggaccagtgagctggggagggactcggatgaactgaggcgcagcctacgccattgccttggacaggactctggccacaggcagggcgggtctgtgtcccatgtgtcctgtcagtcccctgagtatgtgtgtgggtgtggcgcatgtgcaggtctgtgcctcctgtcgggatttgggttttaacgtcttctgctggcccagccctgctctgttgtggggagttggcccccaggggaaagggctgtgagctgctccgccattaaactcacctccacctgagggcgctctgctgatctccgcctgggccctgatggccgtccccacccacctgccttccggcccggctccctggcggagccagaacccagggagttgcccgcgtgctgtccttcccctctgtgttgtgattgggttgtttcctgccctgcctggggctgcttctcgtcaccaagccctggtcctgcggcagctgtcacccctaccatccataccactgtgctgaccgctcagcctgaagagcagagaatgccatgggtgggactgtgggggtcggatcgtggggttgttggcagagggcaaccctgggccccacaccgtgtggacaggcagacaccagattgtccaggagcaggagctgctgggactgcgctggccccggacctagtgggccttctcctggctgctgagatgtcgtctgtgactggcctggctggagggggagtgttgacaacccaaagctgttctccagtctggggagggagaggcagggtccccaatgtccgagctgcatctggacgctgctcttaaaggacctcctggggcaggggagcggtagggtctggactgggcagatgctgtatgacctccctgagcacccgtgactgccccatgctttcccctttgtgctctgtgtgtgtctgggctgtgcccgggggcttcacaaataaagtcgtgtggcagcttcagagactcagaaactctcactgaaagcgggatagtctcgggggccgttgtacgtggagtcccacctcggcagagcatgcggccccgcagcagtctgtggggcagtcagccctgcagaagggcccggcctcggcctcaggccactacctgggaagtggcagtcctgagtgggggcccattttcctgcctggccacacctcacccagcaccctgcctttgggctgcagctcgcttggcttctgcgttgctccttcactatggaagccacctcccttgggatcctttgctccactgccacatatgtgaggacagcccagccaaccttccttacctcctaccctacaccatgtatgtgctttgggagcccatgtcccccacaaacggcctccaagaagtccctccaaggtttcttagagggcaatattttctcattggcagtcggccacgtaggtgaccaggtggcagaggatactgctggccctgtcccctgtcttctgtgtgagttgatacggtagggggtgggtgtggggctggcattaagttctgatgccagctacaacgtggatgaactttgaaaacatgttaaatga

SEQ ID NO: 1045 - DNA, 3622 bp, Homo sapiens
ctgccggctttcaaaatcctcctcctccgccatcatccgccgcggtgcggagagcaggtggtgctggaagcgcgtgaggccgggagctcgagagagctaacagactagccggctggacatctggaccgctggatccggaggtggcgaccccggcctgacccggaccctaaatccgtccccgccccagagggcggaggcgcgcgctcgattccccccacgcggcggcgccgcctgtttacgtctgcagatctccaggggagcccaccagcctagtcaacatggcctcggaagacattgccaagctggcagagacacttgccaagactcaggtggccgggggacagctgagtttcaaaggcaagagcctcaaactcaacactgcagaagatgctaaagatgtgattaaagagattgaagactttgacagcttggaggctctgcgtctggaaggcaacacagtgggcgtggaagcagccagggtcatcgccaaggccttagagaagaagtcggagttgaagcgctgccactggagtgacatgttcacgggaaggctgcggaccgagatcccaccagccctgatctcactaggggaaggactcatcacagctggggctcagctggtggagctggacttaagcgacaacgcattcgggcccgacggtgtgcaaggcttcgaggccctgctcaagagctcagcctgcttcaccctgcaggaactcaagctcaacaactgtggcatgggcattggcggcggcaagatcctggctgcagctctgaccgaatgtcaccggaaatccagtgcccaaggcaagcctctggccctgaaggtctttgtggctggcagaaaccgtctggagaatgatggcgccactgccttggcagaagcttttagggtcatcgggaccctggaggaggtccacatgccacagaatgggatcaaccaccctggcatcactgccctggcccaggctttcgctgtcaaccccctgctgcgggtcatcaacctgaatgacaacaccttcactgagaagggcgccgtggccatggccgagaccttgaagaccttgcggcaggtggaggtgattaattttggggactgcctggtgcgctccaagggtgcagttgccattgcagatgccatccgcggcggcctgcccaagctaaaggagctgaacttgtcattctgtgaaatcaagagggatgctgccctggctgttgctgaggccatggcagacaaagctgagctggagaagctggacctgaatggcaacaccctgggagaagaaggctgtgaacagcttcaggaggtgctggagggcttcaacatggccaaggtgctggcgtccctcagtgatgacgaggacgaggaggaggaggaggaaggagaagaggaagaagaggaagcagaagaagaggaggaggaagatgaggaagaggaggaagaagaggaggaggaggaggaagaagagcctcagcagcgagggcagggagagaagtcagccacgccctcacggaagattctggaccctaacactggggagccagctcccgtgctgtcctccccacctcctgcagacgtctccaccttcctggcttttccctctccagagaagctgctgcgcctagggcccaagagctccgtgctgatagcccagcagactgacacgtctgaccccgagaaggtggtctctgccttcctaaaggtgtcatctgtgttcaaggacgaagctactgtgaggatggcagtgcaggatgcagtagatgccctgatgcagaaggctttcaactcctcgtccttcaactccaacaccttcctcaccaggctcctcgtgcacatgggtctgctcaagagtgaagacaaggtcaaggccattgccaacctgtacggccccctgatggcgctgaaccacatggtgcagcaggactatttccccaaggcccttgcacccctgctgctggcgttcgtgaccaagcccaacagcgccctggaatcctgctccttcgcccgccacagtctgctgcagacgctgtacaaggtctagactcaaagcctctcccatcccttggcctggaccagtgagctggggagggactcggatgaactgaggcgcagcctacgccattgccttggacaggactctggccacaggcagggcgggtctgtgtcccatgtgtcctgtcagtcccctgagtatgtgtgtgggtgtggcgcatgtgcaggtctgtgcctcctgtcgggatttgggttttaacgtcttctgctggcccagccctgctctgttgtggggagttggcccccaggggaaagggctgtgagctgctccgccattaaactcacctccacctgagggcgctctgctgatctccgcctgggccctgatggccgtccccacccacctgccttccggcccggctccctggcggagccagaacccagggagttgcccgcgtgctgtccttcccctctgtgttgtgattgggttgtttcctgccctgcctggggctgcttctcgtcaccaagccctggtcctgcggcagctgtcacccctaccatccataccactgtgctgaccgctcagcctgaagagcagagaatgccatgggtgggactgtgggggtcggatcgtggggttgttggcagagggcaaccctgggccccacaccgtgtggacaggcagacaccagattgtccaggagcaggagctgctgggactgcgctggccccggacctagtgggccttctcctggctgctgagatgtcgtctgtgactggcctggctggagggggagtgttgacaacccaaagctgttctccagtctggggagggagaggcagggtccccaatgtccgagctgcatctggacgctgctcttaaaggacctcctggggcaggggagcggtagggtctggactgggcagatgctgtatgacctccctgagcacccgtgactgccccatgctttcccctttgtgctctgtgtgtgtctgggctgtgcccgggggcttcacaaataaagtcgtgtggcagcttcagagactcagaaactctcactgaaagcgggatagtctcgggggccgttgtacgtggagtcccacctcggcagagcatgcggccccgcagcagtctgtggggcagtcagccctgcagaagggcccggcctcggcctcaggccactacctgggaagtggcagtcctgagtgggggcccattttcctgcctggccacacctcacccagcaccctgcctttgggctgcagctcgcttggcttctgcgttgctccttcactatggaagccacctcccttgggatcctttgctccactgccacatatgtgaggacagcccagccaaccttccttacctcctaccctacaccatgtatgtgctttgggagcccatgtcccccacaaacggcctccaagaagtccctccaaggtttcttagagggcaatattttctcattggcagtcggccacgtaggtgaccaggtggcagaggatactgctggccctgtcccctgtcttctgtgtgagttgatacggtagggggtgggtgtggggctggcattaagttctgatgccagctacaacgtggatgaactttgaaaacatgttaaatga

SEQ ID NO: 1046 - DNA, 1764 bp, Homo sapiens
atggcctcggaagacattgccaagctggcagagacacttgccaagactcaggtggccgggggacagctgagtttcaaaggcaagagcctcaaactcaacactgcagaagatgctaaagatgtgattaaagagattgaagactttgacagcttggaggctctgcgtctggaaggcaacacagtgggcgtggaagcagccagggtcatcgccaaggccttagagaagaagtcggagttgaagcgctgccactggagtgacatgttcacgggaaggctgcggaccgagatcccaccagccctgatctcactaggggaaggactcatcacagctggggctcagctggtggagctggacttaagcgacaacgcattcgggcccgacggtgtgcaaggcttcgaggccctgctcaagagctcagcctgcttcaccctgcaggaactcaagctcaacaactgtggcatgggcattggcggcggcaagatcctggctgcagctctgaccgaatgtcaccggaaatccagtgcccaaggcaagcctctggccctgaaggtctttgtggctggcagaaaccgtctggagaatgatggcgccactgccttggcagaagcttttagggtcatcgggaccctggaggaggtccacatgccacagaatgggatcaaccaccctggcatcactgccctggcccaggctttcgctgtcaaccccctgctgcgggtcatcaacctgaatgacaacaccttcactgagaagggcgccgtggccatggccgagaccttgaagaccttgcggcaggtggaggtgattaattttggggactgcctggtgcgctccaagggtgcagttgccattgcagatgccatccgcggcggcctgcccaagctaaaggagctgaacttgtcattctgtgaaatcaagagggatgctgccctggctgttgctgaggccatggcagacaaagctgagctggagaagctggacctgaatggcaacaccctgggagaagaaggctgtgaacagcttcaggaggtgctggagggcttcaacatggccaaggtgctggcgtccctcagtgatgacgaggacgaggaggaggaggaggaaggagaagaggaagaagaggaagcagaagaagaggaggaggaagatgaggaagaggaggaagaagaggaggaggaggaggaagaagagcctcagcagcgagggcagggagagaagtcagccacgccctcacggaagattctggaccctaacactggggagccagctcccgtgctgtcctccccacctcctgcagacgtctccaccttcctggcttttccctctccagagaagctcctgcgcctagggcccaagagctccgtgctgatagcccagcagactgacacgtctgaccccgagaaggtggtctctgccttcctaaaggtgtcatctgtgttcaaggacgaagctactgtgaggatggcagtgcaggatgcagtagatgccctgatgcagaaggctttcaactcctcgtccttcaactccaacaccttcctcaccaggctcctcgtgcacatgggtctgctcaagagtgaagacaaggtcaaggccattgccaacctgtacggccccctgatggcgctgaaccacatggtgcagcaggactatttccccaaggcccttgcacccctgctgctggcgttcgtgaccaagcccaacagcgccctggaatcctgctccttcgcccgccacagtctgctgcagacgctgtacaaggtctag

SEQ ID NO: 1047 - DNA, 3382 bp, Homo sapiens
tctgcagatctccaggggagcccaccagcctagtcaacatggcctcggaagacattgccaagctggcagagacacttgccaagactcaggtggccgggggacagctgagtttcaaaggcaagagcctcaaactcaacactgcagaagatgctaaagatgtgattaaagagattgaagactttgacagcttggaggctctgcgtctggaaggcaacacagtgggcgtggaagcagccagggtcatcgccaaggccttagagaagaagtcggagttgaagcgctgccactggagtgacatgttcacgggaaggctgcggaccgagatcccaccagccctgatctcactaggggaaggactcatcacagctggggctcagctggtggagctggacttaagcgacaacgcattcgggcccgacggtgtgcaaggcttcgaggccctgctcaagagctcagcctgcttcaccctgcaggaactcaagctcaacaactgtggcatgggcattggcggcggcaagatcctggctgcagctctgaccgaatgtcaccggaaatccagtgcccaaggcaagcctctggccctgaaggtctttgtggctggcagaaaccgtctggagaatgatggcgccactgccttggcagaagcttttagggtcatcgggaccctggaggaggtccacatgccacagaatgggatcaaccaccctggcatcactgccctggcccaggctttcgctgtcaaccccctgctgcgggtcatcaacctgaatgacaacaccttcactgagaagggcgccgtggccatggccgagaccttgaagaccttgcggcaggtggaggtgattaattttggggactgcctggtgcgctccaagggtgcagttgccattgcagatgccatccgcggcggcctgcccaagctaaaggagctgaacttgtcattctgtgaaatcaagagggatgctgccctggctgttgctgaggccatggcagacaaagctgagctggagaagctggacctgaatggcaacaccctgggagaagaaggctgtgaacagcttcaggaggtgctggagggcttcaacatggccaaggtgctggcgtccctcagtgatgacgaggacgaggaggaggaggaggaaggagaagaggaagaagaggaagcagaagaagaggaggaggaagatgaggaagaggaggaagaagaggaggaggaggaggaagaagagcctcagcagcgagggcagggagagaagtcagccacgccctcacggaagattctggaccctaacactggggagccagctcccgtgctgtcctccccacctcctgcagacgtctccaccttcctggcttttccctctccagagaagctgctgcgcctagggcccaagagctccgtgctgatagcccagcagactgacacgtctgaccccgagaaggtggtctctgccttcctaaaggtgtcatctgtgttcaaggacgaagctactgtgaggatggcagtgcaggatgcagtagatgccctgatgcagaaggctttcaactcctcgtccttcaactccaacaccttcctcaccaggctcctcgtgcacatgggtctgctcaagagtgaagacaaggtcaaggccattgccaacctgtacggccccctgatggcgctgaaccacatggtgcagcaggactatttccccaaggcccttgcacccctgctgctggcgttcgtgaccaagcccaacagcgccctggaatcctgctccttcgcccgccacagtctgctgcagacgctgtacaaggtctagactcaaagcctctcccatcccttggcctggaccagtgagctggggagggactcggatgaactgaggcgcagcctacgccattgccttggacaggactctggccacaggcagggcgggtctgtgtcccatgtgtcctgtcagtcccctgagtatgtgtgtgggtgtggcgcatgtgcaggtctgtgcctcctgtcgggatttgggttttaacgtcttctgctggcccagccctgctctgttgtggggagttggcccccaggggaaagggctgtgagctgctccgccattaaactcacctccacctgagggcgctctgctgatctccgcctgggccctgatggccgtccccacccacctgccttccggcccggctccctggcggagccagaacccagggagttgcccgcgtgctgtccttcccctctgtgttgtgattgggttgtttcctgccctgcctggggctgcttctcgtcaccaagccctggtcctgcggcagctgtcacccctaccatccataccactgtgctgaccgctcagcctgaagagcagagaatgccatgggtgggactgtgggggtcggatcgtggggttgttggcagagggcaaccctgggccccacaccgtgtggacaggcagacaccagattgtccaggagcaggagctgctgggactgcgctggccccggacctagtgggccttctcctggctgctgagatgtcgtctgtgactggcctggctggagggggagtgttgacaacccaaagctgttctccagtctggggagggagaggcagggtccccaatgtccgagctgcatctggacgctgctcttaaaggacctcctggggcaggggagcggtagggtctggactgggcagatgctgtatgacctccctgagcacccgtgactgccccatgctttcccctttgtgctctgtgtgtgtctgggctgtgcccgggggcttcacaaataaagtcgtgtggcagcttcagagactcagaaactctcactgaaagcgggatagtctcgggggccgttgtacgtggagtcccacctcggcagagcatgcggccccgcagcagtctgtggggcagtcagccctgcagaagggcccggcctcggcctcaggccactacctgggaagtggcagtcctgagtgggggcccattttcctgcctggccacacctcacccagcaccctgcctttgggctgcagctcgcttggcttctgcgttgctccttcactatggaagccacctcccttgggatcctttgctccactgccacatatgtgaggacagcccagccaaccttccttacctcctaccctacaccatgtatgtgctttgggagcccatgtcccccacaaacggcctccaagaagtccctccaaggtttcttagagggcaatattttctcattggcagtcggccacgtaggtgaccaggtggcagaggatactgctggccctgtcccctgtcttctgtgtgagttgatacggtagggggtgggtgtggggctggcattaagttctgatgccagctacaacgtggatgaactttgaaaacatgttaaatga

SEQ ID NO: 1048 - DNA, 3719 bp, Homo sapiens
gccgcctgtttacggtagagtcagggtccctttcctttccccgtcacctgcctggaacaggggtgcggggcgaggagggcgtggcgcccgtgtgcgccttctgcctgccccctcggccttcttcacttagccttcgacggccgagcgccccaggggtggcggtgggagtggggttgttgagcggcgctggctcctttcacaaatggggaaactgaggcttaaagggcgtctgactcgccagagcagctcagcctgcagctgctagcagtggcgtctcatattagcattgttgtcaaccggaggcggtgcgagtccgccggggattccagatggggctcctgcgccgcccgcctatcatttgcggcctgtattcgcgcgtcgctcccgcagagccacctcccagcaggcccacgcccgcgggggccccgggctggcgccgctgtccctggaatcgattctgcagatctccaggggagcccaccagcctagtcaacatggcctcggaagacattgccaagctggcagagacacttgccaagactcaggtggccgggggacagctgagtttcaaaggcaagagcctcaaactcaacactgcagaagatgctaaagatgtgattaaagagattgaagactttgacagcttggaggctctgcgtctggaaggcaacacagtgggcgtggaagcagccagggtcatcgccaaggccttagagaagaagtcggagttgaagcgctgccactggagtgacatgttcacgggaaggctgcggaccgagatcccaccagccctgatctcactaggggaaggactcatcacagctggggctcagctggtggagctggacttaagcgacaacgcattcgggcccgacggtgtgcaaggcttcgaggccctgctcaagagctcagcctgcttcaccctgcaggaactcaagctcaacaactgtggcatgggcattggcggcggcaagatcctggctgcagctctgaccgaatgtcaccggaaatccagtgcccaaggcaagcctctggccctgaaggtctttgtggctggcagaaaccgtctggagaatgatggcgccactgccttggcagaagcttttagggtcatcgggaccctggaggaggtccacatgccacagaatgggatcaaccaccctggcatcactgccctggcccaggctttcgctgtcaaccccctgctgcgggtcatcaacctgaatgacaacaccttcactgagaagggcgccgtggccatggccgagaccttgaagaccttgcggcaggtggaggtgattaattttggggactgcctggtgcgctccaagggtgcagttgccattgcagatgccatccgcggcggcctgcccaagctaaaggagctgaacttgtcattctgtgaaatcaagagggatgctgccctggctgttgctgaggccatggcagacaaagctgagctggagaagctggacctgaatggtagcaacaccctgggagaagaaggctgtgaacagcttcaggaggtgctggagggcttcaacatggccaaggtgctggcgtccctcagtgatgacgaggacgaggaggaggaggaggaaggagaagaggaagaagaggaagcagaagaagaggaggaggaagatgaggaagaggaggaagaagaggaggaggaggaggaagaagagcctcagcagcgagggcagggagagaagtcagccacgccctcacggaagattctggaccctaacactggggagccagctcccgtgctgtcctccccacctcctgcagacgtctccaccttcctggcttttccctctccagagaagctgctgcgcctagggcccaagagctccgtgctgatagcccagcagactgacacgtctgaccccgagaaggtggtctctgccttcctaaaggtgtcatctgtgttcaaggacgaagctactgtgaggatggcagtgcaggatgcagtagatgccctgatgcagaaggctttcaactcctcgtccttcaactccaacaccttcctcaccaggctcctcgtgcacatgggtctgctcaaggcccaacagcgccctggaatcctgctccttcgcccgccacagtctgctgcagacgctgtacaaggtctagactcaaagcctctcccatcccttggcctggaccagtgagctggggagggactcggatgaactgaggcgcagcctacgccattgccttggacaggactctggccacaggcagggcgggtctgtgtcccatgtgtcctgtcagtcccctgagtatgtgtgtgggtgtggcgcatgtgcaggtctgtgcctcctgtcgggatttgggttttaacgtcttctgctggcccagccctgctctgttgtggggagttggcccccaggggaaagggctgtgagctgctccgccattaaactcacctccacctgagggcgctctgctgatctccgcctgggccctgatggccgtccccacccacctgccttccggcccggctccctggcggagccagaacccagggagttgcccgcgtgctgtccttcccctctgtgttgtgattgggttgtttcctgccctgcctggggctgcttctcgtcaccaagccctggtcctgcggcagctgtcacccctaccatccataccactgtgctgaccgctcagcctgaagagcagagaatgccatgggtgggactgtgggggtcggatcgtggggttgttggcagagggcaaccctgggccccacaccgtgtggacaggcagacaccagattgtccaggagcaggagctgctgggactgcgctggccccggacctagtgggccttctcctggctgctgagatgtcgtctgtgactggcctggctggagggggagtgttgacaacccaaagctgttctccagtctggggagggagaggcagggtccccaatgtccgagctgcatctggacgctgctcttaaaggacctcctggggcaggggagcggtagggtctggactgggcagatgctgtatgacctccctgagcacccgtgactgccccatgctttcccctttgtgctctgtgtgtgtctgggctgtgcccgggggcttcacaaataaagtcgtgtggcagcttcagagactcagaaactctcactgaaagcgggatagtctcgggggccgttgtacgtggagtcccacctcggcagagcatgcggccccgcagcagtctgtggggcagtcagccctgcagaagggcccggcctcggcctcaggccactacctgggaagtggcagtcctgagtgggggcccattttcctgcctggccacacctcacccagcaccctgcctttgggctgcagctcgcttggcttctgcgttgctccttcactatggaagccacctcccttgggatcctttgctccactgccacatatgtgaggacagcccagccaaccttccttacctcctaccctacaccatgtatgtgctttgggagcccatgtcccccacaaacggcctccaagaagtccctccaaggtttcttagagggcaatattttctcattggcagtcggccacgtaggtgaccaggtggcagaggatactgctggccctgtcccctgtcttctgtgtgagttgatacggtagggggtgggtgtggggctggcattaagttctgatgccagctacaacgtggatgaactttgaaaacatgttaaatga

SEQ ID NO: 1049 - DNA, 2423 bp, Homo sapiens
gaattccggctagaaatgaatatgtaagaaagcttatagtagtttaaatcatttgtagaaccagccgagtttctcaagtcgcctccagaccgcagacatgaaacttgtcttcctcgtcctgctgttcctcggggccctcggactgtgtctggctggccgtaggagaaggagtgttcagtggtgcgccgtatcccaacccgaggccacaaaatgcttccaatggcaaaggaatatgagaaaagtgcgtggccctcctgtcagctgcataaagagagactcccccatccagtgtatccaggccattgcggaaaacagggccgatgctgtgacccttgatggtggtttcatatacgaggcaggcctggccccctacaaactgcgacctgtagcggcggaagtctacgggaccgaaagacagccacgaactcactattatgccgtggctgtggtgaagaagggcggcagctttcagctgaacgaactgcaaggtctgaagtcctgccacacaggccttcgcaggaccgctggatggaatgtccctatagggacacttcgtccattcttgaattggacgggtccacctgagcccattgaggcagctgtggccaggttcttctcagccagctgtgttcccggtgcagataaaggacagttccccaacctgtgtcgcctgtgtgcggggacaggggaaaacaaatgtgccttctcctcccaggaaccgtacttcagctactctggtgccttcaagtgtctgagagacggggctggagacgtggcttttatcagagagagcacagtgtttgaggacctgtcagacgaggctgaaagggacgagtatgagttactctgcccagacaacactcggaagccagtggacaagttcaaagactgccatctggcccgggtcccttctcatgccgttgtggcacgaagtgtgaatggcaaggaggatgccatctggaatcttctccgccaggcacaggaaaagtttggaaaggacaagtcaccgaaattccagctctttggctcccctagtgggcagaaagatctgctgttcaaggactctgccattgggttttcgagggtgcccccgaggatagattctgggctgtaccttggctccggctacttcactgccatccagaacttgaggaaaagtgaggaggaagtggctgcccggcgtgcgcgggtcgtgtggtgtgcggtgggcgagcaggagctgcgcaagtgtaaccagtggagtggcttgagcgaaggcagcgtgacctgctcctcggcctccaccacagaggactgcatcgccctggtgctgaaaggagaagctgatgccatgagtttggatggaggatatgtgtacactgcaggcaaatgtggtttggtgcctgtcctggcagagaactacaaatcccaacaaagcagtgaccctgatcctaactgtgtggatagacctgtggaaggatatcttgctgtggcggtggttaggagatcagacactagccttacctggaactctgtgaaaggcaagaagtcctgccacaccgccgtggacaggactgcaggctggaatatccccatgggcctgctcttcaaccagacgggctcctgcaaatttgatgaatatttcagtcaaagctgtgcccctgggtctgacccgagatctaatctctgtgctctgtgtattggcgacgagcagggtgagaataagtgcgtgcccaacagcaacgagagatactacggctacactggggctttccggtgcctggctgagaatgctggagacgttgcatttgtgaaagatgtcactgtcttgcagaacactgatggaaataacaatgaggcatgggctaaggatttgaagctggcagactttgcgctgctgtgcctcgatggcaaacggaagcctgtgactgaggctagaagctgccatcttgccatggccccgaatcatgccgtggtgtctcggatggataaggtggaacgcctgaaacaggtgttgctccaccaacaggctaaatttgggagaaatggatctgactgcccggacaagttttgcttattccagtctgaaaccaaaaaccttctgttcaatgacaacactgagtgtctggccagactccatggcaaaacaacatatgaaaaatatttgggaccacagtatgtcgcaggcattactaatctgaaaaagtgctcaacctcccccctcctggaagcctgtgaattcctcaggaagtaaaaccgaagaagatggcccagctccccaagaaagcctcagccattcactgcccccagctcttctccccaggtgtgttgggccttggcctcccctgctgaaggtggggattgcccatccatctgcttacaattccctgctgtcgtcttagcaagaagtaaaatgagaaattttgttgtatattctctcctta

SEQ ID NO: 1050 - DNA, 2902 bp, Homo sapiens
gactcctaggggcttgcagactagtgggagagaaagaacatcgcagcagccaggcagaaccaggacaggtgaggtgcaggctggctttcctctcgcagcgcggtgtggagtcctgtcctgcctcagggcttttcggagcctggatcctcaaggaacaagtagacctggccgcggggagtggggagggaaggggtgtctattgggcaacagggcggggcaaagccctgaataaaggggcgcagggcaggcgcaagtggcagagccttcgtttgccaagtcgcctccagaccgcagacatgaaacttgtcttcctcgtcctgctgttcctcggggccctcggactgtgtctggctggccgtaggagaaggagtgttcagtggtgcgccgtatcccaacccgaggccacaaaatgcttccaatggcaaaggaatatgagaaaagtgcgtggccctcctgtcagctgcataaagagagactcccccatccagtgtatccaggccattgcggaaaacagggccgatgctgtgacccttgatggtggtttcatatacgaggcaggcctggccccctacaaactgcgacctgtagcggcggaagtctacgggaccgaaagacagccacgaactcactattatgccgtggctgtggtgaagaagggcggcagctttcagctgaacgaactgcaaggtctgaagtcctgccacacaggccttcgcaggaccgctggatggaatgtccctatagggacacttcgtccattcttgaattggacgggtccacctgagcccattgaggcagctgtggccaggttcttctcagccagctgtgttcccggtgcagataaaggacagttccccaacctgtgtcgcctgtgtgcggggacaggggaaaacaaatgtgccttctcctcccaggaaccgtacttcagctactctggtgccttcaagtgtctgagagacggggctggagacgtggcttttatcagagagagcacagtgtttgaggacctgtcagacgaggctgaaagggacgagtatgagttactctgcccagacaacactcggaagccagtggacaagttcaaagactgccatctggcccgggtcccttctcatgccgttgtggcacgaagtgtgaatggcaaggaggatgccatctggaatcttctccgccaggcacaggaaaagtttggaaaggacaagtcaccgaaattccagctctttggctcccctagtgggcagaaagatctgctgttcaaggactctgccattgggttttcgagggtgcccccgaggatagattctgggctgtaccttggctccggctacttcactgccatccagaacttgaggaaaagtgaggaggaagtggctgcccggcgtgcgcgggtcgtgtggtgtgcggtgggcgagcaggagctgcgcaagtgtaaccagtggagtggcttgagcgaaggcagcgtgacctgctcctcggcctccaccacagaggactgcatcgccctggtgctgaaaggagaagctgatgccatgagtttggatggaggatatgtgtacactgcaggcaaatgtggtttggtgcctgtcctggcagagaactacaaatcccaacaaagcagtgaccctgatcctaactgtgtggatagacctgtggaaggatatcttgctgtggcggtggttaggagatcagacactagccttacctggaactctgtgaaaggcaagaagtcctgccacaccgccgtggacaggactgcaggctggaatatccccatgggcctgctcttcaaccagacgggctcctgcaaatttgatgaatatttcagtcaaagctgtgcccctgggtctgacccgagatctaatctctgtgctctgtgtattggcgacgagcagggtgagaataagtgcgtgcccaacagcaacgagagatactacggctacactggggctttccggtgcctggctgagaatgctggagacgttgcatttgtgaaagatgtcactgtcttgcagaacactgatggaaataacaatgacgcatgggctaaggatttgaagctggcagactttgcgctgctgtgcctcgatggcaaacggaagcctgtgactgaggctagaagctgccatcttgccatggccccgaatcatgccgtggtgtctcggatggataaggtggaacgcctgaaacaggtgttgctccaccaacaggctaaatttgggagaaatggatctgactgcccggacaagttttgcttattccagtctgaaaccaaaaaccttctgttcaatgacaacactgagtgtctggccagactccatggcaaaacaacatatgaaaaatatttgggaccacagtatgtcgcaggcattactaatctgaaaaagtgctcaacctcccccctcctggaagcctgtgaattcctcaggaagtaaaaccgaagaagatggcccagctccccaagaaagcctcagccattcactgcccccagctcttctccccaggtgtgttggggccttggcctcccctgctgaaggtggggattgcccatccatctgcttacaattccctgctgtcgtcttagcaagaagtaaaatgagaaattttgttgatattctctccttataaagtgtcactcatcttttctagaattttatactgaaatcacatgcctgacaaaatacctgtacagttggaccttcccttccaagtttttcaggtccagcccctcctctttcttgcagtcttgggtatgatgcccaagggtctggaatttaaggccaggccaagcaccggttttcctaaggggatcttgttggttattcacatagctgtctcagtgcacgtgcatgtatgtgcctgggagtgtgtgcgtgtccccaaggcagggcaggaagagcaagca

SEQ ID NO: 1051 - DNA, 2619 bp, Homo sapiens
gactcctaggggcttgcagacctagtgggagagaaagaacatcgcagcagccaggcagaaccaggacaggtgaggtgcaggctggctttcctctcgcagcgcggtgtggagtcctgtcctgcctcagggcttttcggagcctggatcctcaaggaacaagtagacctggccgcggggagtggggagggaaggggtgtctattgggcaacagggcggcaaagccctgaataaaggggcgcagggcaggcgcaagtgcagagccttcgtttgccaagtcgcctccagaccgcagacatgaaacttgtcttcctcgtcctgctgttcctcggggccctcggactgtgtctggctggccgtaggagaaggagtgttcagtggtgcgccgtatcccaacccgaggccacaaaatgcttccaatggcaaaggaatatgagaaaagtgcgtggccctcctgtcagctgcataaagagagactcccccatccagtgtatccaggccattgcggaaaacagggccgatgctgtgacccttgatggtggtttcatatacgaggcaggcctggccccctacaaactgcgacctgtagcggcggaagtctacgggaccgaaagacagccacgaactcactattatgccgtggctgtggtgaagaagggcggcagctttcagctgaacgaactgcaaggtctgaagtcctgccacacaggccttcgcaggaccgctggatggaatgtccctacagggacacttcgtccattcttgaattggacgggtccacctgagcccattgaggcagctgtggccaggttcttctcagccagctgtgttcccggtgcagataaaggacagttccccaacctgtgtcgcctgtgtgcggggacaggggaaaacaaatgtgccttctcctcccaggaaccgtacttcagctactctggtgccttcaagtgtctgagagacggggctggagacgtggcttttatcagagagagcacagtgtttgaggacctgtcagacgaggctgaaagggacgagtatgagttactctgcccagacaacactcggaagccagtggacaagttcaaagactgccatctggcccgggtcccttctcatgccgttgtggcacgaagtgtgaatggcaaggaggatgccatctggaatcttctccgccaggcacaggaaaagtttggaaaggacaagtcaccgaaattccagctctttggctcccctagtgggcagaaagatctgctgttcaaggactctgccattgggttttcgagggtgcccccgaggatagattctgggctgtaccttggctccggctacttcactgccatccagaacttgaggaaaagtgaggaggaagtggctgcccggcgtgcgcgggtcgtgtggtgtgcggtgggcgagcaggagctgcgcaagtgtaaccagtggagtggcttgagcgaaggcagcgtgacctgctcctcggcctccaccacagaggactgcatcgccctggtgctgaaaggagaagctgatgccatgagtttggatggaggatatgtgtacactgcatgcaaatgtggtttggtgcctgtcctggcagagaactacaaatcccaacaaagcagtgaccctgatcctaactgtgtggatagacctgtggaaggatatcttgctgtggcggtggttaggagatcagacactagccttacctggaactctgtgaaaggcaagaagtcctgccacaccgccgtggacaggactgcaggctggaatatccccatgggcctgctcttcaaccagacgggctcctgcaaatttgatgaatatttcagtcaaagctgtgcccctgggtctgacccgagatctaatctctgtgctctgtgtattggcgacgagcagggtgagaataagtgcgtgcccaacagcaacgagagatactacggctacactggggctttccggtgcctggctgagaatgctggagacgttgcatttgtgaaagatgtcactgtcttgcagaacactgatggaaataacaatgaggcatgggctaaggatttgaagctggcagactttgcgctgctgtgcctcgatggcaaacggaagcctgtgactgaggctagaagctgccatcttgccatggccccgaatcatgccgtggtgtctcggatggataaggtggaacgcctgaaacaggtgctgctccaccaacaggctaaatttgggagaaatggatctgactgcccggacaagttttgcttattccagtctgaaaccaaaaaccttctgttcaatgacaacactgagtgtctggccagactccatggcaaaacaacatatgaaaaatatttgggaccacagtatgtcgcaggcattactaatctgaaaaagtgctcaacctcccccctcctggaagcctgtgaattcctcaggaagtaaaaccgaagaagatggcccagctccccaagaaagcctcagccattcactgcccccagctcttctccccaggtgtgttggggccttggctcccctgctgaaggtggggattgcccatccatctgcttacaattccctgctgtcgtcttagcaagaagtaaaatgagaaattttgttgatattcaaaaaaaa

SEQ ID NO: 1052 - DNA, 321 bp, Homo sapiens
atgctccttcacccactgagtagctgcagcgatgctctccatcttggtaacatccagggtcaccgtctccagcctgtcagacgtctggcccctcagctgctcggcccccttctccgtcagacacgcagccagcactctcaagcctcgtgcatccagctgtctggccagcaggttcccaaagcccgagtcacagcccgtgataaagacatacttgtcttggaggtggctcaccacctgcctctcccggtaccagtgcagaaggtagtacaggcccacgaaggccgccaggtagagccacatagtgagggtgcttccttctct

SEQ ID NO: 1053 - DNA, 822 bp, Homo sapiens
gcttgtaaacatataacataaaaatggcttccaaaagagctctggtcatcctggctaaaggagcagaggaaatggagacggtcatccctgtagatgtcatgaggcgagctgggattaaggtcaccgttgcaggcctggctggaaaagacccagtacagtgtagccgtgatgtggtcatttgtcctgatgccagccttgaagatgcaaaaaaagagggaccatatgatgtggtggttctaccaggaggtaatctgggcgcacagaatttatctgagtctgctgctgtgaaggagatactgaaggagcaggaaaaccggaagggcctgatagccgccatctgtgcaggtcctactgctctgttggctcatgaaataggttttggaagtaaagttacaacacaccctcttgctaaagacaaaatgatgaatggaggtcattacacctactctgagaatcgtgtggaaaaagacggcctgattcttacaagccgggggcctgggaccagcttcgagtttgcgcttgcaattgttgaagccctgaatggcaaggaggtggcggctcaagtgaaggctccacttgttcttaaagactagagcagcgaactgcgacgatcacttagagaaacaggccgttaggaatccattctcactgtgttcgctctaaacaaaacagtggtaggttaatgtgttcagaagtcgctgtccttactacttttgcggaagtatggaagtcacaactacacagagatttctcagcctacaaattgtgtctatacatttctaagccttgtttgcagaataaacagggcatttagcaaactac

SEQ ID NO: 1054 - DNA, 911 bp, Homo sapiens
tggcgtgcgttcattttcagcctggtgtggggtgagtggtacccaacgggccggggcgccgcgtccgcaggaagaggcgcggggtgcaggcttgtaaacatataacataaaaatggcttccaaaagagctctggtcatcctggctaaaggagcagaggaaatggagacggtcatccctgtagatgtcatgaggcgagctgggattaaggtcaccgttgcaggcctggctggaaaagacccagtacagtgtagccgtgatgtggtcatttgtcctgatgccagccttgaagatgcaaaaaaagagggaccatatgatgtggtggttctaccaggaggtaatctgggcgcacagaatttatctgagtctgctgctgtgaaggagatactgaaggagcaggaaaaccggaagggcctgatagccgccatctgtgcaggtcctactgctctgttggctcatgaaataggttttggaagtaaagttacaacacaccctcttgctaaagacaaaatgatgaatggaggtcattacacctactctgagaatcgtgtggaaaaagacggcctgattcttacaagccgggggcctgggaccagcttcgagtttgcgcttgcaattgttgaagccctgaatggcaaggaggtggcggctcaagtgaaggctccacttgttcttaaagactagagcagcgaactgcgacgatcacttagagaaacaggccgttaggaatccattctcactgtgttcgctctaaacaaaacagtggtaggttaatgtgttcagaagtcgctgtccttactacttttgcggaagtatggaagtcacaactacacagagatttctcagcctacaaattgtgtctatacatttctaagccttgtttgcagaataaacagggcatttagcaaactac

SEQ ID NO: 1055 - DNA, 13235 bp, Homo sapiens
atggcgggctccggagccggtgtgcgttgctccctgctgcggctgcaggagaccttgtccgctgcggaccgctgcggtgctgccctggccggtcatcaactgatccgcggcctggggcaggaatgcgtcctgagcagcagccccgcggtgctggcattacagacatctttagttttttccagagatttcggtttgcttgtatttgtccggaagtcactcaacagtattgaatttcgtgaatgtagagaagaaatcctaaagtttttatgtattttcttagaaaaaatgggccagaagatcgcaccttactctgttgaaattaagaacacttgtaccagtgtttatacaaaagatagagctgctaaatgtaaaattccagccctggaccttcttattaagttacttcagacttttagaagttctagactcatggatgaatttaaaattggagaattatttagtaaattctatggagaacttgcattgaaaaaaaaaataccagatacagttttagaaaaagtatatgagctcctaggattattgggtgaagttcatcctagtgagatgataaataatgcagaaaacctgttccgcgcttttctgggtgaacttaagacccagatgacatcagcagtaagagagcccaaactacctgttctggcaggatgtctgaaggggttgtcctcacttctgtgcaacttcactaagtccatggaagaagatccccagacttcaagggagatttttaattttgtactaaaggcaattcgtcctcagattgatctgaagagatatgctgtgccctcagctggcttgcgcctatttgccctgcatgcatctcagtttagcacctgccttctggacaactacgtgtctctatttgaagtcttgttaaagtggtgtgcccacacaaatgtagaattgaaaaaagctgcactttcagccctggaatcctttctgaaacaggtttctaatatggtggcgaaaaatgcagaaatgcataaaaataaactgcagtactttatggagcagttttatggaatcatcagaaatgtggattcgaacaacaaggagttatctattgctatccgtggatatggactttttgcaggaccgtgcaaggttataaacgcaaaagatgttgacttcatgtacgttgagctcattcagcgctgcaagcagatgttcctcacccagacagacactggtgacgaccgtgtttatcagatgccaagcttcctccagtctgttgcaagcgtcttgctgtaccttgacacagttcctgaggtgtatactccagttctggagcacctcgtggtgatgcagatagacagtttcccacagtacagtccaaaaatgcagctggtgtgttgcagagccatagtgaaggtgttcctagctttggcagcaaaagggccagttctcaggaattgcattagtactgtggtgcatcagggtttaatcagaatatgttctaaaccagtggtccttccaaagggccctgagtctgaatctgaagaccaccgtgcttcaggggaagtcagaactggcaaatggaaggtgcccacatacaaagactacgtggatctcttcagacatctcctgagctctgaccagatgatggattctattttagcagatgaagcatttttctctgtgaattcctccagtgaaagtctgaatcatttactttatgatgaatttgtaaaatccgttttgaagattgttgagaaattggatcttacacttgaaatacagactgttggggaacaagagaatggagatgaggcgcctggtgtttggatgatcccaacttcagatccagcggctaacttgcatccagctaaacctaaagatttttcggctttcattaacctggtggaattttgcagagagattctccctgagaaacaagcagaattttttgaaccatgggtgtactcattttcatatgaattaattttgcaatctacaaggttgcccctcatcagtggtttctacaaattgctttctattacagtaagaaatgccaagaaaataaaatatttcgagggagttagtccaaagagtctgaaacactctcctgaagacccagaaaagtattcttgctttgctttatttgtgaaatttggcaaagaggtggcagttaaaatgaagcagtacaaagatgaacttttggcctcttgtttgacctttcttctgtccttgccacacaacatcattgaactcgatgttagagcctacgttcctgcactgcagatggctttcaaactgggcctgagctatacccccttggcagaagtaggcctgaatgctctagaagaatggtcaatttatattgacagacatgtaatgcagccttattacaaagacattctcccctgcctggatggatacctgaagacttcagccttgtcagatgagaccaagaataactgggaagtgtcagctctttctcgggctgcccagaaaggatttaataaagtggtgttaaagcatctgaagaagacaaagaacctttcatcaaacgaagcaatatccttagaagaaataagaattagagtagtacaaatgcttggatctctaggaggacaaataaacaaaaatcttctgacagtcacgtcctcagatgagatgatgaagagctatgtggcctgggacagagagaagcggctgagctttgcagtgccctttagagagatgaaacctgtcattttcctggatgtgttcctgcctcgagtcacagaattagcgctcacagccagtgacagacaaactaaagttgcagcctgtgaacttttacatagcatggttatgtttatgttgggcaaagccacgcagatgccagaagggggacagggagccccacccatgtaccagctctataagcggacgtttcctgtgctgcttcgacttgcgtgtgatgttgatcaggtgacaaggcaactgtatgagccactagttatgcagctgattcactggttcactaacaacaagaaatttgaaagtcaggatactgttgccttactagaagctatattggatggaattgtggaccctgttgacagtactttaagagatttttgtggtcggtgtattcgagaattccttaaatggtccattaagcaaataacaccacagcagcaggagaagagtccagtaaacaccaaatcgcttttcaagcgactttatagccttgcgcttcaccccaatgctttcaagaggctgggagcatcacttgcctttaataatatctacagggaattcagggaagaagagtctctggtggaacagtttgtgtttgaagccttggtgatatacatggagagtctggccttagcacatgcagatgagaagtccttaggtacaattcaacagtgttgtgatgccattgatcacctatgccgcatcattgaaaagaagcatgtttctttaaataaagcaaagaaacgacgtttgccgcgaggatttccaccttccgcatcattgtgtttattggatctggtcaagtggcttttagctcattgtgggaggccccagacagaatgtcgacacaaatccattgaactcttttataaattcgttcctttattgccaggcaacagatcccctaatttgtggctgaaagatgttctcaaggaagaaggtgtctcttttctcatcaacacctttgaggggggtggctgtggccagccctcgggcatcctggcccagcccaccctcttgtaccttcgggggccattcagcctgcaggccacgctatgctggctggacctgctcctggccgcgttggagtgctacaacacgttcattggcgagagaactgtaggagcgctccaggtcctaggtactgaagcccagtcttcacttttgaaagcagtggctttcttcttagaaagcattgccatgcatgacattatagcagcagaaaagtgctttggcactggggcagcaggtaacagaacaagcccacaagagggagaaaggtacaactacagcaaatgcaccgttgtggtccggattatggagtttaccacgactctgctaaacacctccccggaaggatggaagctcctgaagaaggacttgtgtaatacacacctgatgagagtcctggtgcagacgctgtgtgagcccgcaagcataggtttcaacatcggagacgtccaggttatggctcatcttcctgatgtttgtgtgaatctgatgaaagctctaaagatgtccccatacaaagatatcctagagacccatctgagagagaaaataacagcacagagcattgaggagctttgtgccgtcaacttgtatggccctgacgcgcaagtggacaggagcaggctggctgctgttgtgtctgcctgtaaacagcttcacagagctgggcttctgcataatatattaccgtctcagtccacagatttgcatcattctgttggcacagaacttctttccctggtttataaaggcattgcccctggagatgagagacagtgtctgccttctctagacctcagttgtaagcagctggccagcggacttctggagttagcctttgcttttggaggactgtgtgagcgccttgtgagtcttctcctgaacccagcggtgctgtccacggcgtccttgggcagctcacagggcagcgtcatccacttctcccatggggagtatttctatagcttgttctcagaaacgatcaacacggaattattgaaaaatctggatcttgctgtattggagctcatgcagtcttcagtggataataccaaaatggtgagtgccgttttgaacggcatgttagaccagagcttcagggagcgagcaaaccagaaacaccaaggactgaaacttgcgactacaattctgcaacactggaagaagtgtgattcatggtgggccaaagattcccctctcgaaactaaaatggcagtgctggccttactggcaaaaattttacagattgattcatctgtatcttttaatacaagtcatggttcattccctgaagtctttacaacatatattagtctacttgctgacacaaagctggatctacatttaaagggccaagctgtcactcttcttccattcttcaccagcctcactggaggcagtctggaggaacttagacgtgttctggagcagctcatcgttgctcacttccccatgcagtccagggaatttcctccaggaactccgcggttcaataattatgtggactgcatgaaaaagtttctagatgcattggaattatctcaaagccctatgttgttggaattgatgacagaagttctttgtcgggaacagcagcatgtcatggaagaattatttcaatccagtttcaggaggattgccagaaggggttcatgtgtcacacaagtaggccttctggaaagcgtgtatgaaatgttcaggaaggatgacccccgcctaagtttcacacgccagtcctttgtggaccgctccctcctcactctgctgtggcactgtagcctggatgctttgagagaattcttcagcacaattgtggtggatgccattgatgtgttgaagtccaggtttacaaagctaaatgaatctacctttgatactcaaatcaccaagaagatgggctactataagattctagacgtgatgtattctcgccttcccaaagatgatgttcatgctaaggaatcaaaaattaatcaagttttccatggctcgtgtattacagaaggaaatgaacttacaaagacattgattaaattgtgctacgatgcatttacagagaacatggcaggagagaatcagctgctggagaggagaagactttaccattgtgcagcatacaactgcgccatatctgtcatctgctgtgtcttcaatgagttaaaattttaccaaggttttctgtttagtgaaaaaccagaaaagaacttgcttatttttgaaaatctgatcgacctgaagcgccgctataattttcctgtagaagttgaggttcctatggaaagaaagaaaaagtacattgaaattaggaaagaagccagagaagcagcaaatggggattcagatggtccttcctatatgtcttccctgtcatatttggcagacagtaccctgagtgaggaaatgagtcaatttgatttctcaaccggagttcagagctattcatacagctcccaagaccctagacctgccactggtcgttttcggagacgggagcagcgggaccccacggtgcatgatgatgtgctggagctggagatggacgagctcaatcggcatgagtgcatggcgcccctgacggccctggtcaagcacatgcacagaagcctgggcccgcctcaaggagaagaggattcagtgccaagagatcttccttcttggatgaaattcctccatggcaaactgggaaatccaatagtaccattaaatatccgtctcttcttagccaagcttgttattaatacagaagaggtctttcgcccttacgcgaagcactggcttagccccttgctgcagctggctgcttctgaaaacaatggaggagaaggaattcactacatggtggttgagatagtggccactattctttcatggacaggcttggccactccaacaggggtccctaaagatgaagtgttagcaaatcgattgcttaatttcctaatgaaacatgtctttcatccaaaaagagctgtgtttagacacaaccttgaaattataaagacccttgtcgagtgctggaaggattgtttatccatcccttataggttaatatttgaaaagttttccggtaaagatcctaattctaaagacaactcagtagggattcaattgctaggcatcgtgatggccaatgacctgcctccctatgacccacagtgtggcatccagagtagcgaatacttccaggctttggtgaataatatgtcctttgtaagatataaagaagtgtatgccgctgcagcagaagttctaggacttatacttcgatatgttatggagagaaaaaacatactggaggagtctctgtgtgaactggttgcgaaacaattgaagcaacatcagaatactatggaggacaagtttattgtgtgcttgaacaaagtgaccaagagcttccctcctcttgcagacaggttcatgaatgctgtgttctttctgctgccaaaatttcatggagtgttgaaaacactctgtctggaggtggtactttgtcgtgtggagggaatgacagagctgtacttccagttaaagagcaaggacttcgttcaagtcatgagacatagagatgatgaaagacaaaaagtatgtttggacataatttataagatgatgccaaagttaaaaccagtagaactccgagaacttctgaaccccgttgtggaattcgtttcccatccttctacaacatgtagggaacaaatgtataatattctcatgtggattcatgataattacagagatccagaaagtgagacagataatgactcccaggaaatatttaagttggcaaaagatgtgctgattcaaggattgatcgatgagaaccctggacttcaattaattattcgaaatttctggagccatgaaactaggttaccttcaaataccttggaccggttgctggcactaaattccttatattctcctaagatagaagtgcactttttaagtttagcaacaaattttctgctcgaaatgaccagcatgagcccagattatccaaaccccatgttcgagcatcctctgtcagaatgcgaatttcaggaatataccattgattctgattggcgtttccgaagtactgttctcactccgatgtttgtggagacccaggcctcccagggcactctccagacccgtacccaggaagggtccctctcagctcgctggccagtggcagggcagataagggccacccagcagcagcatgacttcacactgacacagactgcagatggaagaagctcatttgattggctgaccgggagcagcactgacccgctggtcgaccacaccagtccctcatctgactccttgctgtttgcccacaagaggagtgaaaggttacagagagcacccttgaagtcagtggggcctgattttgggaaaaaaaggctgggccttccaggggacgaggtggataacaaagtgaaaggtgcggccggccggacggacctactacgactgcgcagacggtttatgagggaccaggagaagctcagtttgatgtatgccagaaaaggcgttgctgagcaaaaacgagagaaggaaatcaagagtgagttaaaaatgaagcaggatgcccaggtcgttctgtacagaagctaccggcacggagaccttcctgacattcagatcaagcacagcagcctcatcaccccgttacaggccgtggcccagagggacccaataattgcaaaacagctctttagcagcttgttttctggaattttgaaagagatggataaatttaagacactgtctgaaaaaaacaacatcactcaaaagttgcttcaagacttcaatcgttttcttaataccaccttctctttctttccaccctttgtctcttgtattcaggacattagctgtcagcacgcagccctgctgagcctcgacccagcggctgttagcgctggttgcctggccagcctacagcagcccgtgggcatccgcctgctagaggaggctctgctccgcctgctgcctgctgagctgcctgccaagcgagtccgtgggaaggcccgcctccctcctgatgtcctcagatgggtggagcttgctaagctgtatagatcaattggagaatacgacgtcctccgtgggatttttaccagtgagataggaacaaagcaaatcactcagagtgcattattagcagaagccagaagtgattattctgaagctgctaagcagtatgatgaggctctcaataaacaagactgggtagatggtgagcccacagaagccgagaaggatttttgggaacttgcatcccttgactgttacaaccaccttgctgagtggaaatcacttgaatactgttctacagccagtatagacagtgagaaccccccagacctaaataaaatctggagtgaaccattttatcaggaaacatatctaccttacatgatccgcagcaagctgaagctgctgctccagggagaggctgaccagtccctgctgacatttattgacaaagctatgcacggggagctccagaaggcgattctagagcttcattacagtcaagagctgagtctgctttacctcctgcaagatgatgttgacagagccaaatattacattcaaaatggcattcagagttttatgcagaattattctagtattgatgtcctcttacaccaaagtagactcaccaaattgcagtctgtacaggctttaacagaaattcaggagttcatcagctttataagcaaacaaggcaatttatcatctcaagttccccttaagagacttctgaacacctggacaaacagatatccagatgctaaaatggacccaatgaacatctgggatgacatcatcacaaatcgatgtttctttctcagcaaaatagaggagaagcttacccctcttccagaagataatagtatgaatgtggatcaagatggagaccccagtgacaggatggaagtgcaagagcaggaagaagatatcagctccctgatcaggagttgcaagttttccatgaaaatgaagatgatagacagtgcccggaagcagaacaatttctcacttgctatgaaactactgaaggagctgcataaagagtcaaaaaccagagacgattggctggtgagctgggtgcagagctactgccgcctgagccactgccggagccggtcccagggctgctctgagcaggtgctcactgtgctgaaaacagtctctttgttggatgagaacaacgtgtcaagctacttaagcaaaaatattctggctttccgtgaccagaacattctcttgggtacaacttacaggatcatagcgaatgctctcagcagtgagccagcctgccttgctgaaatcgaggaggacaaggctagaagaatcttagagctttctggatccagttcagaggattcagagaaggtgatcgcgggtctgtaccagagagcattccagcacctctctgaggctgtgcaggcggctgaggaggaggcccagcctccctcctggagctgtgggcctgcagctggggtgattgatgcttacatgacgctggcagatttctgtgaccaacagctgcgcaaggaggaagagaatgcatcagttattgattctgcagaactgcaggcgtatccagcacttgtggtggagaaaatgttgaaagctttaaaattaaattccaatgaagccagattgaagtttcctagattacttcagattatagaacggtatccagaggagactttgagcctcatgacaaaagagatctcttccgttccctgctggcagttcatcagctggatcagccacatggtggccttactggacaaagaccaagccgttgctgttcagcactctgtggaagaaatcactgataactacccgcaggctattgtttatcccttcatcataagcagcgaaagctattccttcaaggatacttctactggtcataagaataaggagtttgtggcaaggattaaaagtaagttggatcaaggaggagtgattcaagattttattaatgccttagatcagctctctaatcctgaactgctctttaaggattggagcaatgatgtaagagctgaactagcaaaaacccctgtaaataaaaaaaacattgaaaaaatgtatgaaagaatgtatgcagccttgggtgacccaaaggctccaggcctgggggcctttagaaggaagtttattcagacttttggaaaagaatttgataaacattttgggaaaggaggttctaaactactgagaatgaagctcagtgacttcaacgacattaccaacatgctacttttaaaaatgaacaaagactcaaagccccctgggaatctgaaagaatgttcaccctggatgagcgacttcaaagtggagttcctgagaaatgagctggagattcccggtcagtatgacggtaggggaaagccattgccagagtaccacgtgcgaatcgccgggtttgatgagcgggtagtcatggcgtctctgcgaaggcccaagcgcatcatcatccgtggccatgacgagagggaacaccctttcctggtgaagggtggcgaggacctgcggcaggaccagcgcgtggagcagctcttccaggtcatgaatgggatcctggcccaagactccgcctgcagccagagggccctgcagctgaggacctatagcgttgtgcccatgacctccaggttaggattaattgagtggcttgaaaatactgttaccttgaaggaccttcttttgaacaccatgtcccaagaggagaaggcggcttacctgagtgatcccagggcaccgccgtgtgaatataaagattggctgacaaaaatgtcaggaaaacatgatgttggagcttacatgctaatgtataagggcgctaatcgtactgaaacagtcacgtcttttagaaaacgagaaagtaaagtgcctgctgatctcttaaagcgggccttcgtgaggatgagtacaagccctgaggctttcctggcgctccgctcccacttcgccagctctcacgctctgatatgcatcagccactggatcctcgggattggagacagacatctgaacaactttatggtggccatggagactggcggcgtgatcgggatcgactttgggcatgcgtttggatccgctacacagtttctgccagtccctgagttgatgccttttcggctaactcgccagtttatcaatctgatgttaccaatgaaagaaacgggccttatgtacagcatcatggtacacgcactccgggccttccgctcagaccctggcctgctcaccaacaccatggatgtgtttgtcaaggagccctcctttgattggaaaaattttgaacagaaaatgctgaaaaaaggagggtcatggattcaagaaataaatgttgctgaaaaaaattggtacccccgacagaaaatatgttacgctaagagaaagttagcaggtgccaatccagcagtcattacttgtgatgagctactcctgggtcatgagaaggcccctgccttcagagactatgtggctgtggcacgaggaagcaaagatcacaacattcgtgcccaagaaccagagagtgggctttcagaagagactcaagtgaagtgcctgatggaccaggcaacagaccccaacatccttggcagaacctgggaaggatgggagccctggatgtgaggtctgtgggagtctgcagatagaaagcattacattgtttaaagaatctactatactttggttggcagcattccatgagctgattttcctgaaacactaaagagaaatgtcttttgtgctacagtttcgtagcatgagtttaaatcaagattatgatgagtaaatgtgtatgggtttgtgatcagctttcaaagcatttacaagtgctgcaagttagtgaaacagctgtctccgtaaatggaggaaatgtggggaagccttggaatgcccttctggttctggcacattggaaagcacactcagaaggcttcatcaccaagattttgggagagtaaagctaagtatagttgatgtaacattgtagaagcagcataggaacaataagaacaataggtaaagctataattatggcttatatttagaaatgactgcatttgatattttaggatatttttctaggttttttcctttcattttattctcttctagttttgacattttatgatagatttgctctctagaaggaaacgtctttatttaggagggcaaaaattttggtcatagcattcacttttgctattccaatctacaactggaagatacataaaagtgctttgcattgaatttgggataacttcaaaaatcccatggttgttgttagggatagtactaagcatttcagttccaggagaataaaagaaattcctatttgaaatgaattcctcatttggaggaaaaaaagcatgcattctagcacaacaagatgaaattatggaatacaaaagtggctccttcccatgtgcagtccctgtccccccccgccagtcctccacacccaaactgtttctgat

SEQ ID NO: 1056 - DNA, 13509 bp, Homo sapiens
ggggcatttccgggtccgggccgagcgggcgcacgcgcgggagcgggactcggcggcatggcgggctccggagccggtgtgcgttgctccctgctgcggctgcaggagaccttgtccgctgcggaccgctgcggtgctgccctggccggtcatcaactgatccgcggcctggggcaggaatgcgtcctgagcagcagccccgcggtgctggcattacagacatctttagttttttccagagatttcggtttgcttgtatttgtccggaagtcactcaacagtattgaatttcgtgaatgtagagaagaaatcctaaagtttttatgtattttcttagaaaaaatgggccagaagatcgcaccttactctgttgaaattaagaacacttgtaccagtgtttatacaaaagatagagctgctaaatgtaaaattccagccctggaccttcttattaagttacttcagacttttagaagttctagactcatggatgaatttaaaattggagaattatttagtaaattctatggagaacttgcattgaaaaaaaaaataccagatacagttttagaaaaagtatatgagctcctaggattattgggtgaagttcatcctagtgagatgataaataatgcagaaaacctgttccgcgcttttctgggtgaacttaagacccagatgacatcagcagtaagagagcccaaactacctgttctggcaggatgtctgaaggggttgtcctcacttctgtgcaacttcactaagtccatggaagaagatccccagacttcaagggagatttttaattttgtactaaaggcaattcgtcctcagattgatctgaagagatatgctgtgccctcagctggcttgcgcctatttgccctgcatgcatctcagtttagcacctgccttctggacaactacgtgtctctatttgaagtcttgttaaagtggtgtgcccacacaaatgtagaattgaaaaaagctgcactttcagccctggaatcctttctgaaacaggtttctaatatggtggcgaaaaatgcagaaatgcataaaaataaactgcagtactttatggagcagttttatggaatcatcagaaatgtggattcgaacaacaaggagttatctattgctatccgtggatatggactttttgcaggaccgtgcaaggttataaacgcaaaagatgttgacttcatgtacgttgagctcattcagcgctgcaagcagatgttcctcacccagacagacactggtgacgaccgtgtttatcagatgccaagcttcctccagtctgttgcaagcgtcttgctgtaccttgacacagttcctgaggtgtatactccagttctggagcacctcgtggtgatgcagatagacagtttcccacagtacagtccaaaaatgcagctggtgtgttgcagagccatagtgaaggtgttcctagctttggcagcaaaagggccagttctcaggaattgcattagtactgtggtgcatcagggtttaatcagaatatgttctaaaccagtggtccttccaaagggccctgagtctgaatctgaagaccaccgtgcttcaggggaagtcagaactggcaaatggaaggtgcccacatacaaagactacgtggatctcttcagacatctcctgagctctgaccagatgatggattctattttagcagatgaagcatttttctctgtgaattcctccagtgaaagtctgaatcatttactttatgatgaatttgtaaaatccgttttgaagattgttgagaaattggatcttacacttgaaatacagactgttggggaacaagagaatggagatgaggcgcctggtgtttggatgatcccaacttcagatccagcggctaacttgcatccagctaaacctaaagatttttcggctttcattaacctggtggaattttgcagagagattctccctgagaaacaagcagaattttttgaaccatgggtgtactcattttcatatgaattaattttgcaatctacaaggttgcccctcatcagtggtttctacaaattgctttctattacagtaagaaatgccaagaaaataaaatatttcgagggagttagtccaaagagtctgaaacactctcctgaagacccagaaaagtattcttgctttgctttatttgtgaaatttggcaaagaggtggcagttaaaatgaagcagtacaaagatgaacttttggcctcttgtttgacctttcttctgtccttgccacacaacatcattgaactcgatgttagagcctacgttcctgcactgcagatggctttcaaactgggcctgagctatacccccttggcagaagtaggcctgaatgctctagaagaatggtcaatttatattgacagacatgtaatgcagccttattacaaagacattctcccctgcctggatggatacctgaagacttcagccttgtcagatgagaccaagaataactgggaagtgtcagctctttctcgggctgcccagaaaggatttaataaagtggtgttaaagcatctgaagaagacaaagaacctttcatcaaacgaagcaatatccttagaagaaataagaattagagtagtacaaatgcttggatctctaggaggacaaataaacaaaaatcttctgacagtcacgtcctcagatgagatgatgaagagctatgtggcctgggacagagagaagcggctgagctttgcagtgccctttagagagatgaaacctgtcattttcctggatgtgttcctgcctcgagtcacagaattagcgctcacagccagtgacagacaaactaaagttgcagcctgtgaacttttacatagcatggttatgtttatgttgggcaaagccacgcagatgccagaagggggacagggagccccacccatgtaccagctctataagcggacgtttcctgtgctgcttcgacttgcgtgtgatgttgatcaggtgacaaggcaactgtatgagccactagttatgcagctgattcactggttcactaacaacaagaaatttgaaagtcaggatactgttgccttactagaagctatattggatggaattgtggaccctgttgacagtactttaagagatttttgtggtcggtgtattcgagaattccttaaatggtccattaagcaaataacaccacagcagcaggagaagagtccagtaaacaccaaatcgcttttcaagcgactttatagccttgcgcttcaccccaatgctttcaagaggctgggagcatcacttgcctttaataatatctacagggaattcagggaagaagagtctctggtggaacagtttgtgtttgaagccttggtgatatacatggagagtctggccttagcacatgcagatgagaagtccttaggtacaattcaacagtgttgtgatgccattgatcacctatgccgcatcattgaaaagaagcatgtttctttaaataaagcaaagaaacgacgtttgccgcgaggatttccaccttccgcatcattgtgtttattggatctggtcaagtggcttttagctcattgtgggaggccccagacagaatgtcgacacaaatccattgaactcttttataaattcgttcctttattgccaggcaacagatcccctaatttgtggctgaaagatgttctcaaggaagaaggtgtctcttttctcatcaacacctttgaggggggtggctgtggccagccctcgggcatcctggcccagcccaccctcttgtaccttcgggggccattcagcctgcaggccacgctatgctggctggacctgctcctggccgcgttggagtgctacaacacgttcattggcgagagaactgtaggagcgctccaggtcctaggtactgaagcccagtcttcacttttgaaagcagtggctttcttcttagaaagcattgccatgcatgacattatagcagcagaaaagtgctttggcactggggcagcaggtaacagaacaagcccacaagagggagaaaggtacaactacagcaaatgcaccgttgtggtccggattatggagtttaccacgactctgctaaacacctccccggaaggatggaagctcctgaagaaggacttgtgtaatacacacctgatgagagtcctggtgcagacgctgtgtgagcccgcaagcataggtttcaacatcggagacgtccaggttatggctcatcttcctgatgtttgtgtgaatctgatgaaagctctaaagatgtccccatacaaagatatcctagagacccatctgagagagaaaataacagcacagagcattgaggagctttgtgccgtcaacttgtatggccctgacgcgcaagtggacaggagcaggctggctgctgttgtgtctgcctgtaaacagcttcacagagctgggcttctgcataatatattaccgtctcagtccacagatttgcatcattctgttggcacagaacttctttccctggtttataaaggcattgcccctggagatgagagacagtgtctgccttctctagacctcagttgtaagcagctggccagcggacttctggagttagcctttgcttttggaggactgtgtgagcgccttgtgagtcttctcctgaacccagcggtgctgtccacggcgtccttgggcagctcacagggcagcgtcatccacttctcccatggggagtatttctatagcttgttctcagaaacgatcaacacggaattattgaaaaatctggatcttgctgtattggagctcatgcagtcttcagtggataataccaaaatggtgagtgccgttttgaacggcatgttagaccagagcttcagggagcgagcaaaccagaaacaccaaggactgaaacttgcgactacaattctgcaacactggaagaagtgtgattcatggtgggccaaagattcccctctcgaaactaaaatggcagtgctggccttactggcaaaaattttacagattgattcatctgtatcttttaatacaagtcatggttcattccctgaagtctttacaacatatattagtctacttgctgacacaaagctggatctacatttaaagggccaagctgtcactcttcttccattcttcaccagcctcactggaggcagtctggaggaacttagacgtgttctggagcagctcatcgttgctcacttccccatgcagtccagggaatttcctccaggaactccgcggttcaataattatgtggactgcatgaaaaagtttctagatgcattggaattatctcaaagccctatgttgttggaattgatgacagaagttctttgtcgggaacagcagcatgtcatggaagaattatttcaatccagtttcaggaggattgccagaaggggttcatgtgtcacacaagtaggccttctggaaagcgtgtatgaaatgttcaggaaggatgacccccgcctaagtttcacacgccagtcctttgtggaccgctccctcctcactctgctgtggcactgtagcctggatgctttgagagaattcttcagcacaattgtggtggatgccattgatgtgttgaagtccaggtttacaaagctaaatgaatctacctttgatactcaaatcaccaagaagatgggctactataagattctagacgtgatgtattctcgccttcccaaagatgatgttcatgctaaggaatcaaaaattaatcaagttttccatggctcgtgtattacagaaggaaatgaacttacaaagacattgattaaattgtgctacgatgcatttacagagaacatggcaggagagaatcagctgctggagaggagaagactttaccattgtgcagcatacaactgcgccatatctgtcatctgctgtgtcttcaatgagttaaaattttaccaaggttttctgtttagtgaaaaaccagaaaagaacttgcttatttttgaaaatctgatcgacctgaagcgccgctataattttcctgtagaagttgaggttcctatggaaagaaagaaaaagtacattgaaattaggaaagaagccagagaagcagcaaatggggattcagatggtccttcctatatgtcttccctgtcatatttggcagacagtaccctgagtgaggaaatgagtcaatttgatttctcaaccggagttcagagctattcatacagctcccaagaccctagacctgccactggtcgttttcggagacgggagcagcgggaccccacggtgcatgatgatgtgctggagctggagatggacgagctcaatcggcatgagtgcatggcgcccctgacggccctggtcaagcacatgcacagaagcctgggcccgcctcaaggagaagaggattcagtgccaagagatcttccttcttggatgaaattcctccatggcaaactgggaaatccaatagtaccattaaatatccgtctcttcttagccaagcttgttattaatacagaagaggtctttcgcccttacgcgaagcactggcttagccccttgctgcagctggctgcttctgaaaacaatggaggagaaggaattcactacatggtggttgagatagtggccactattctttcatggacaggcttggccactccaacaggggtccctaaagatgaagtgttagcaaatcgattgcttaatttcctaatgaaacatgtctttcatccaaaaagagctgtgtttagacacaaccttgaaattataaagacccttgtcgagtgctggaaggattgtttatccatcccttataggttaatatttgaaaagttttccggtaaagatcctaattctaaagacaactcagtagggattcaattgctaggcatcgtgatggccaatgacctgcctccctatgacccacagtgtggcatccagagtagcgaatacttccaggctttggtgaataatatgtcctttgtaagatataaagaagtgtatgccgctgcagcagaagttctaggacttatacttcgatatgttatggagagaaaaaacatactggaggagtctctgtgtgaactggttgcgaaacaattgaagcaacatcagaatactatggaggacaagtttattgtgtgcttgaacaaagtgaccaagagcttccctcctcttgcagacaggttcatgaatgctgtgttctttctgctgccaaaatttcatggagtgttgaaaacactctgtctggaggtggtactttgtcgtgtggagggaatgacagagctgtacttccagttaaagagcaaggacttcgttcaagtcatgagacatagagatgatgaaagacaaaaagtatgtttggacataatttataagatgatgccaaagttaaaaccagtagaactccgagaacttctgaaccccgttgtggaattcgtttcccatccttctacaacatgtagggaacaaatgtataatattctcatgtggattcatgataattacagagatccagaaagtgagacagataatgactcccaggaaatatttaagttggcaaaagatgtgctgattcaaggattgatcgatgagaaccctggacttcaattaattattcgaaatttctggagccatgaaactaggttaccttcaaataccttggaccggttgctggcactaaattccttatattctcctaagatagaagtgcactttttaagtttagcaacaaattttctgctcgaaatgaccagcatgagcccagattatccaaaccccatgttcgagcatcctctgtcagaatgcgaatttcaggaatataccattgattctgattggcgtttccgaagtactgttctcactccgatgtttgtggagacccaggcctcccagggcactctccagacccgtacccaggaagggtccctctcagctcgctggccagtggcagggcagataagggccacccagcagcagcatgacttcacactgacacagactgcagatggaagaagctcatttgattggctgaccgggagcagcactgacccgctggtcgaccacaccagtccctcatctgactccttgctgtttgcccacaagaggagtgaaaggttacagagagcacccttgaagtcagtggggcctgattttgggaaaaaaaggctgggccttccaggggacgaggtggataacaaagtgaaaggtgcggccggccggacggacctactacgactgcgcagacggtttatgagggaccaggagaagctcagtttgatgtatgccagaaaaggcgttgctgagcaaaaacgagagaaggaaatcaagagtgagttaaaaatgaagcaggatgcccaggtcgttctgtacagaagctaccggcacggagaccttcctgacattcagatcaagcacagcagcctcatcaccccgttacaggccgtggcccagagggacccaataattgcaaaacagctctttagcagcttgttttctggaattttgaaagagatggataaatttaagacactgtctgaaaaaaacaacatcactcaaaagttgcttcaagacttcaatcgttttcttaataccaccttctctttctttccaccctttgtctcttgtattcaggacattagctgtcagcacgcagccctgctgagcctcgacccagcggctgttagcgctggttgcctggccagcctacagcagcccgtgggcatccgcctgctagaggaggctctgctccgcctgctgcctgctgagctgcctgccaagcgagtccgtgggaaggcccgcctccctcctgatgtcctcagatgggtggagcttgctaagctgtatagatcaattggagaatacgacgtcctccgtgggatttttaccagtgagataggaacaaagcaaatcactcagagtgcattattagcagaagccagaagtgattattctgaagctgctaagcagtatgatgaggctctcaataaacaagactgggtagatggtgagcccacagaagccgagaaggatttttgggaacttgcatcccttgactgttacaaccaccttgctgagtggaaatcacttgaatactgttctacagccagtatagacagtgagaaccccccagacctaaataaaatctggagtgaaccattttatcaggaaacatatctaccttacatgatccgcagcaagctgaagctgctgctccagggagaggctgaccagtccctgctgacatttattgacaaagctatgcacggggagctccagaaggcgattctagagcttcattacagtcaagagctgagtctgctttacctcctgcaagatgatgttgacagagccaaatattacattcaaaatggcattcagagttttatgcagaattattctagtattgatgtcctcttacaccaaagtagactcaccaaattgcagtctgtacaggctttaacagaaattcaggagttcatcagctttataagcaaacaaggcaatttatcatctcaagttccccttaagagacttctgaacacctggacaaacagatatccagatgctaaaatggacccaatgaacatctgggatgacatcatcacaaatcgatgtttctttctcagcaaaatagaggagaagcttacccctcttccagaagataatagtatgaatgtggatcaagatggagaccccagtgacaggatggaagtgcaagagcaggaagaagatatcagctccctgatcaggagttgcaagttttccatgaaaatgaagatgatagacagtgcccggaagcagaacaatttctcacttgctatgaaactactgaaggagctgcataaagagtcaaaaaccagagacgattggctggtgagctgggtgcagagctactgccgcctgagccactgccggagccggtcccagggctgctctgagcaggtgctcactgtgctgaaaacagtctctttgttggatgagaacaacgtgtcaagctacttaagcaaaaatattctggctttccgtgaccagaacattctcttgggtacaacttacaggatcatagcgaatgctctcagcagtgagccagcctgccttgctgaaatcgaggaggacaaggctagaagaatcttagagctttctggatccagttcagaggattcagagaaggtgatcgcgggtctgtaccagagagcattccagcacctctctgaggctgtgcaggcggctgaggaggaggcccagcctccctcctggagctgtgggcctgcagctggggtgattgatgcttacatgacgctggcagatttctgtgaccaacagctgcgcaaggaggaagagaatgcatcagttattgattctgcagaactgcaggcgtatccagcacttgtggtggagaaaatgttgaaagctttaaaattaaattccaatgaagccagattgaagtttcctagattacttcagattatagaacggtatccagaggagactttgagcctcatgacaaaagagatctcttccgttccctgctggcagttcatcagctggatcagccacatggtggccttactggacaaagaccaagccgttgctgttcagcactctgtggaagaaatcactgataactacccgcaggctattgtttatcccttcatcataagcagcgaaagctattccttcaaggatacttctactggtcataagaataaggagtttgtggcaaggattaaaagtaagttggatcaaggaggagtgattcaagattttattaatgccttagatcagctctctaatcctgaactgctctttaaggattggagcaatgatgtaagagctgaactagcaaaaacccctgtaaataaaaaaaacattgaaaaaatgtatgaaagaatgtatgcagccttgggtgacccaaaggctccaggcctgggggcctttagaaggaagtttattcagacttttggaaaagaatttgataaacattttgggaaaggaggttctaaactactgagaatgaagctcagtgacttcaacgacattaccaacatgctacttttaaaaatgaacaaagactcaaagccccctgggaatctgaaagaatgttcaccctggatgagcgacttcaaagtggagttcctgagaaatgagctggagattcccggtcagtatgacggtaggggaaagccattgccagagtaccacgtgcgaatcgccgggtttgatgagcgggtgacagtcatggcgtctctgcgaaggcccaagcgcatcatcatccgtggccatgacgagagggaacaccctttcctggtgaagggtggcgaggacctgcggcaggaccagcgcgtggagcagctcttccaggtcatgaatgggatcctggcccaagactccgcctgcagccagagggccctgcagctgaggacctatagcgttgtgcccatgacctccaggttaggattaattgagtggcttgaaaatactgttaccttgaaggaccttcttttgaacaccatgtcccaagaggagaaggcggcttacctgagtgatcccagggcaccgccgtgtgaatataaagattggctgacaaaaatgtcaggaaaacatgatgttggagcttacatgctaatgtataagggcgctaatcgtactgaaacagtcacgtcttttagaaaacgagaaagtaaagtgcctgctgatctcttaaagcgggccttcgtgaggatgagtacaagccctgaggctttcctggcgctccgctcccacttcgccagctctcacgctctgatatgcatcagccactggatcctcgggattggagacagacatctgaacaactttatggtggccatggagactggcggcgtgatcgggatcgactttgggcatgcgtttggatccgctacacagtttctgccagtccctgagttgatgccttttcggctaactcgccagtttatcaatctgatgttaccaatgaaagaaacgggccttatgtacagcatcatggtacacgcactccgggccttccgctcagaccctggcctgctcaccaacaccatggatgtgtttgtcaaggagccctcctttgattggaaaaattttgaacagaaaatgctgaaaaaaggagggtcatggattcaagaaataaatgttgctgaaaaaaattggtacccccgacagaaaatatgttacgctaagagaaagttagcaggtgccaatccagcagtcattacttgtgatgagctactcctgggtcatgagaaggcccctgccttcagagactatgtggctgtggcacgaggaagcaaagatcacaacattcgtgcccaagaaccagagagtgggctttcagaagagactcaagtgaagtgcctgatggaccaggcaacagaccccaacatccttggcagaacctgggaaggatgggagccctggatgtgaggtctgtgggagtctgcagatagaaagcattacattgtttaaagaatctactatactttggttggcagcattccatgagctgattttcctgaaacactaaagagaaatgtcttttgtgctacagtttcgtagcatgagtttaaatcaagattatgatgagtaaatgtgtatgggttaaatcaaagataaggttatagtaacatcaaagattaggtgaggtttatagaaagatagatatccaggcttaccaaagtattaagtcaagaatataatatgtgatcagctttcaaagcatttacaagtgctgcaagttagtgaaacagctgtctccgtaaatggaggaaatgtggggaagccttggaatgcccttctggttctggcacattggaaagcacactcagaaggcttcatcaccaagattttgggagagtaaagctaagtatagttgatgtaacattgtagaagcagcataggaacaataagaacaataggtaaagctataattatggcttatatttagaaatgactgcatttgatattttaggatatttttctaggttttttcctttcattttattctcttctagttttgacattttatgatagatttgctctctagaaggaaacgtctttatttaggagggcaaaaattttggtcatagcattcacttttgctattccaatctacaactggaagatacataaaagtgctttgcattgaatttgggataacttcaaaaatcccatggttgttgttagggatagtactaagcatttcagttccaggagaataaaagaaattcctatttgaaatgaattcctcatttggaggaaaaaaagcatgcattctagcacaacaagatgaaattatggaatacaaaagtggctccttcccatgtgcagtccctgtccccccccgccagtcctccacacccaaactgtttctgattggcttttagctttttgttgtttttttttttccttctaacacttgtatttggaggctcttctgtgattttgagaagtatactcttgagtgtttaataaagtttttttccaaaagta

SEQ ID NO: 1057 - DNA, 13142 bp, Homo sapiens
atggcgggctccggagccggtgtgcgttgctccctgctgcggctgcaggagaccttgtccgctgcggaccgctgcggtgctgccctggccggtcatcaactgatccgcggcctggggcaggaatgcgtcctgagcagcagccccgcggtgctggcattacagacatctttagttttttccagagatttcggtttgcttgtatttgtccggaagtcactcaacagtattgaatttcgtgaatgtagagaagaaatcctaaagtttttatgtattttcttagaaaaaatgggccagaagatcgcaccttactctgttgaaattaagaacacttgtaccagtgtttatacaaaagatagagctgctaaatgtaaaattccagccctggaccttcttattaagttacttcagacttttagaagttctagactcatggatgaatttaaaattggagaattatttagtaaattctatggagaacttgcattgaaaaaaaaaataccagatacagttttagaaaaagtatatgagctcctaggattattgggtgaagttcatcctagtgagatgataaataatgcagaaaacctgttccgcgcttttctgggtgaacttaagacccagatgacatcagcagtaagagagcccaaactacctgttctggcaggatgtctgaaggggttgtcctcacttctgtgcaacttcactaagtccatggaagaagatccccagacttcaagggagatttttaattttgtactaaaggcaattcgtcctcagattgatctgaagagatatgctgtgccctcagctggcttgcgcctatttgccctgcatgcatctcagtttagcacctgccttctggacaactacgtgtctctatttgaagtcttgttaaagtggtgtgcccacacaaatgtagaattgaaaaaagctgcactttcagccctggaatcctttctgaaacaggtttctaatatggtggcgaaaaatgcagaaatgcataaaaataaactgcagtactttatggagcagttttatggaatcatcagaaatgtggattcgaacaacaaggagttatctattgctatccgtggatatggactttttgcaggaccgtgcaaggttataaacgcaaaagatgttgacttcatgtacgttgagctcattcagcgctgcaagcagatgttcctcacccagacagacactggtgacgaccgtgtttatcagatgccaagcttcctccagtctgttgcaagcgtcttgctgtaccttgacacagttcctgaggtgtatactccagttctggagcacctcgtggtgatgcagatagacagtttcccacagtacagtccaaaaatgcagctggtgtgttgcagagccatagtgaaggtgttcctagctttggcagcaaaagggccagttctcaggaattgcattagtactgtggtgcatcagggtttaatcagaatatgttctaaaccagtggtccttccaaagggccctgagtctgaatctgaagaccaccgtgcttcaggggaagtcagaactggcaaatggaaggtgcccacatacaaagactacgtggatctcttcagacatctcctgagctctgaccagatgatggattctattttagcagatgaagcatttttctctgtgaattcctccagtgaaagtctgaatcatttactttatgatgaatttgtaaaatccgttttgaagattgttgagaaattggatcttacacttgaaatacagactgttggggaacaagagaatggagatgaggcgcctggtgtttggatgatcccaacttcagatccagcggctaacttgcatccagctaaacctaaagatttttcggctttcattaacctggtggaattttgcagagagattctccctgagaaacaagcagaattttttgaaccatgggtgtactcattttcatatgaattaattttgcaatctacaaggttgcccctcatcagtggtttctacaaattgctttctattacagtaagaaatgccaagaaaataaaatatttcgagggagttagtccaaagagtctgaaacactctcctgaagacccagaaaagtattcttgctttgctttatttgtgaaatttggcaaagaggtggcagttaaaatgaagcagtacaaagatgaacttttggcctcttgtttgacctttcttctgtccttgccacacaacatcattgaactcgatgttagagcctacgttcctgcactgcagatggctttcaaactgggcctgagctatacccccttggcagaagtaggcctgaatgctctagaagaatggtcaatttatattgacagacatgtaatgcagccttattacaaagacattctcccctgcctggatggatacctgaagacttcagccttgtcagatgagaccaagaataactgggaagtgtcagctctttctcgggctgcccagaaaggatttaataaagtggtgttaaagcatctgaagaagacaaagaacctttcatcaaacgaagcaatatccttagaagaaataagaattagagtagtacaaatgcttggatctctaggaggacaaataaacaaaaatcttctgacagtcacgtcctcagatgagatgatgaagagctatgtggcctgggacagagagaagcggctgagctttgcagtgccctttagagagatgaaacctgtcattttcctggatgtgttcctgcctcgagtcacagaattagcgctcacagccagtgacagacaaactaaagttgcagcctgtgaacttttacatagcatggttatgtttatgttgggcaaagccacgcagatgccagaagggggacagggagccccacccatgtaccagctctataagcggacgtttcctgtgctgcttcgacttgcgtgtgatgttgatcaggtgacaaggcaactgtatgagccactagttatgcagctgattcactggttcactaacaacaagaaatttgaaagtcaggatactgttgccttactagaagctatattggatggaattgtggaccctgttgacagtactttaagagatttttgtggtcggtgtattcgagaattccttaaatggtccattaagcaaataacaccacagcagcaggagaagagtccagtaaacaccaaatcgcttttcaagcgactttatagccttgcgcttcaccccaatgctttcaagaggctgggagcatcacttgcctttaataatatctacagggaattcagggaagaagagtctctggtggaacagtttgtgtttgaagccttggtgatatacatggagagtctggccttagcacatgcagatgagaagtccttaggtacaattcaacagtgttgtgatgccattgatcacctatgccgcatcattgaaaagaagcatgtttctttaaataaagcaaagaaacgacgtttgccgcgaggatttccaccttccgcatcattgtgtttattggatctggtcaagtggcttttagctcattgtgggaggccccagacagaatgtcgacacaaatccattgaactcttttataaattcgttcctttattgccaggcaacagatcccctaatttgtggctgaaagatgttctcaaggaagaaggtgtctcttttctcatcaacacctttgaggggggtggctgtggccagccctcgggcatcctggcccagcccaccctcttgtaccttcgggggccattcagcctgcaggccacgctatgctggctggacctgctcctggccgcgttggagtgctacaacacgttcattggcgagagaactgtaggagcgctccaggtcctaggtactgaagcccagtcttcacttttgaaagcagtggctttcttcttagaaagcattgccatgcatgacattatagcagcagaaaagtgctttggcactggggcagcaggtaacagaacaagcccacaagagggagaaaggtacaactacagcaaatgcaccgttgtggtccggattatggagtttaccacgactctgctaaacacctccccggaaggatggaagctcctgaagaaggacttgtgtaatacacacctgatgagagtcctggtgcagacgctgtgtgagcccgcaagcataggtttcaacatcggagacgtccaggttatggctcatcttcctgatgtttgtgtgaatctgatgaaagctctaaagatgtccccatacaaagatatcctagagacccatctgagagagaaaataacagcacagagcattgaggagctttgtgccgtcaacttgtatggccctgacgcgcaagtggacaggagcaggctggctgctgttgtgtctgcctgtaaacagcttcacagagctgggcttctgcataatatattaccgtctcagtccacagatttgcatcattctgttggcacagaacttctttccctggtttataaaggcattgcccctggagatgagagacagtgtctgccttctctagacctcagttgtaagcagctggccagcggacttctggagttagcctttgcttttggaggactgtgtgagcgccttgtgagtcttctcctgaacccagcggtgctgtccacggcgtccttgggcagctcacagggcagcgtcatccacttctcccatggggagtatttctatagcttgttctcagaaacgatcaacacggaattattgaaaaatctggatcttgctgtattggagctcatgcagtcttcagtggataataccaaaatggtgagtgccgttttgaacggcatgttagaccagagcttcagggagcgagcaaaccagaaacaccaaggactgaaacttgcgactacaattctgcaacactggaagaagtgtgattcatggtgggccaaagattcccctctcgaaactaaaatggcagtgctggccttactggcaaaaattttacagattgattcatctgtatcttttaatacaagtcatggttcattccctgaagtctttacaacatatattagtctacttgctgacacaaagctggatctacatttaaagggccaagctgtcactcttcttccattcttcaccagcctcactggaggcagtctggaggaacttagacgtgttctggagcagctcatcgttgctcacttccccatgcagtccagggaatttcctccaggaactccgcggttcaataattatgtggactgcatgaaaaagtttctagatgcattggaattatctcaaagccctatgttgttggaattgatgacagaagttctttgtcgggaacagcagcatgtcatggaagaattatttcaatccagtttcaggaggattgccagaaggggttcatgtgtcacacaagtaggccttctggaaagcgtgtatgaaatgttcaggaaggatgacccccgcctaagtttcacacgccagtcctttgtggaccgctccctcctcactctgctgtggcactgtagcctggatgctttgagagaattcttcagcacaattgtggtggatgccattgatgtgttgaagtccaggtttacaaagctaaatgaatctacctttgatactcaaatcaccaagaagatgggctactataagattctagacgtgatgtattctcgccttcccaaagatgatgttcatgctaaggaatcaaaaattaatcaagttttccatggctcgtgtattacagaaggaaatgaacttacaaagacattgattaaattgtgctacgatgcatttacagagaacatggcaggagagaatcagctgctggagaggagaagactttaccattgtgcagcatacaactgcgccatatctgtcatctgctgtgtcttcaatgagttaaaattttaccaaggttttctgtttagtgaaaaaccagaaaagaacttgcttatttttgaaaatctgatcgacctgaagcgccgctataattttcctgtagaagttgaggttcctatggaaagaaagaaaaagtacattgaaattaggaaagaagccagagaagcagcaaatggggattcagatggtccttcctatatgtcttccctgtcatatttggcagacagtaccctgagtgaggaaatgagtcaatttgatttctcaaccggagttcagagctattcatacagctcccaagaccctagacctgccactggtcgttttcggagacgggagcagcgggaccccacggtgcatgatgatgtgctggagctggagatggacgagctcaatcggcatgagtgcatggcgcccctgacggccctggtcaagcacatgcacagaagcctgggcccgcctcaaggagaagaggattcagtgccaagagatcttccttcttggatgaaattcctccatggcaaactgggaaatccaatagtaccattaaatatccgtctcttcttagccaagcttgttattaatacagaagaggtctttcgcccttacgcgaagcactggcttagccccttgctgcagctggctgcttctgaaaacaatggaggagaaggaattcactacatggtggttgagatagtggccactattctttcatggacaggcttggccactccaacaggggtccctaaagatgaagtgttagcaaatcgattgcttaatttcctaatgaaacatgtctttcatccaaaaagagctgtgtttagacacaaccttgaaattataaagacccttgtcgagtgctggaaggattgtttatccatcccttataggttaatatttgaaaagttttccggtaaagatcctaattctaaagacaactcagtagggattcaattgctaggcatcgtgatggccaatgacctgcctccctatgacccacagtgtggcatccagagtagcgaatacttccaggctttggtgaataatatgtcctttgtaagatataaagaagtgtatgccgctgcagcagaagttctaggacttatacttcgatatgttatggagagaaaaaacatactggaggagtctctgtgtgaactggttgcgaaacaattgaagcaacatcagaatactatggaggacaagtttattgtgtgcttgaacaaagtgaccaagagcttccctcctcttgcagacaggttcatgaatgctgtgttctttctgctgccaaaatttcatggagtgttgaaaacactctgtctggaggtggtactttgtcgtgtggagggaatgacagagctgtacttccagttaaagagcaaggacttcgttcaagtcatgagacatagagatgatgaaagacaaaaagtatgtttggacataatttataagatgatgccaaagttaaaaccagtagaactccgagaacttctgaaccccgttgtggaattcgtttcccatccttctacaacatgtagggaacaaatgtataatattctcatgtggattcatgataattacagagatccagaaagtgagacagataatgactcccaggaaatatttaagttggcaaaagatgtgctgattcaaggattgatcgatgagaaccctggacttcaattaattattcgaaatttctggagccatgaaactaggttaccttcaaataccttggaccggttgctggcactaaattccttatattctcctaagatagaagtgcactttttaagtttagcaacaaattttctgctcgaaatgaccagcatgagcccagattatccaaaccccatgttcgagcatcctctgtcagaatgcgaatttcaggaatataccattgattctgattggcgtttccgaagtactgttctcactccgatgtttgtggagacccaggcctcccagggcactctccagacccgtacccaggaagggtccctctcagctcgctggccagtggcagggcagataagggccacccagcagcagcatgacttcacactgacacagactgcagatggaagaagctcatttgattggctgaccgggagcagcactgacccgctggtcgaccacaccagtccctcatctgactccttgctgtttgcccacaagaggagtgaaaggttacagagagcacccttgaagtcagtggggcctgattttgggaaaaaaaggctgggccttccaggggacgaggtggataacaaagtgaaaggtgcggccggccggacggacctactacgactgcgcagacggtttatgagggaccaggagaagctcagtttgatgtatgccagaaaaggcgttgctgagcaaaaacgagagaaggaaatcaagagtgagttaaaaatgaagcaggatgcccaggtcgttctgtacagaagctaccggcacggagaccttcctgacattcagatcaagcacagcagcctcatcaccccgttacaggccgtggcccagagggacccaataattgcaaaacagctctttagcagcttgttttctggaattttgaaagagatggataaatttaagacactgtctgaaaaaaacaacatcactcaaaagttgcttcaagacttcaatcgttttcttaataccaccttctctttctttccaccctttgtctcttgtattcaggacattagctgtcagcacgcagccctgctgagcctcgacccagcggctgttagcgctggttgcctggccagcctacagcagcccgtgggcatccgcctgctagaggaggctctgctccgcctgctgcctgctgagctgcctgccaagcgagtccgtgggaaggcccgcctccctcctgatgtcctcagatgggtggagcttgctaagctgtatagatcaattggagaatacgacgtcctccgtgggatttttaccagtgagataggaacaaagcaaatcactcagagtgcattattagcagaagccagaagtgattattctgaagctgctaagcagtatgatgaggctctcaataaacaagactgggtagatggtgagcccacagaagccgagaaggatttttgggaacttgcatcccttgactgttacaaccaccttgctgagtggaaatcacttgaatactgttctacagccagtatagacagtgagaaccccccagacctaaataaaatctggagtgaaccattttatcaggaaacatatctaccttacatgatccgcagcaagctgaagctgctgctccagggagaggctgaccagtccctgctgacatttattgacaaagctatgcacggggagctccagaaggcgattctagagcttcattacagtcaagagctgagtctgctttacctcctgcaagatgatgttgacagagccaaatattacattcaaaatggcattcagagttttatgcagaattattctagtattgatgtcctcttacaccaaagtagactcaccaaattgcagtctgtacaggctttaacagaaattcaggagttcatcagctttataagcaaacaaggcaatttatcatctcaagttccccttaagagacttctgaacacctggacaaacagatatccagatgctaaaatggacccaatgaacatctgggatgacatcatcacaaatcgatgtttctttctcagcaaaatagaggagaagcttacccctcttccagaagataatagtatgaatgtggatcaagatggagaccccagtgacaggatggaagtgcaagagcaggaagaagatatcagctccctgatcaggagttgcaagttttccatgaaaatgaagatgatagacagtgcccggaagcagaacaatttctcacttgctatgaaactactgaaggagctgcataaagagtcaaaaaccagagacgattggctggtgagctgggtgcagagctactgccgcctgagccactgccggagccggtcccagggctgctctgagcaggtgctcactgtgctgaaaacagtctctttgttggatgagaacaacgtgtcaagctacttaagcaaaaatattctggctttccgtgaccagaacattctcttgggtacaacttacaggatcatagcgaatgctctcagcagtgagccagcctgccttgctgaaatcgaggaggacaaggctagaagaatcttagagctttctggatccagttcagaggattcagagaaggtgatcgcgggtctgtaccagagagcattccagcacctctctgaggctgtgcaggcggctgaggaggaggcccagcctccctcctggagctgtgggcctgcagctggggtgattgatgcttacatgacgctggcagatttctgtgaccaacagctgcgcaaggaggaagagaatgcatcagttattgattctgcagaactgcaggcgtatccagcacttgtggtggagaaaatgttgaaagctttaaaattaaattccaatgaagccagattgaagtttcctagattacttcagattatagaacggtatccagaggagactttgagcctcatgacaaaagagatctcttccgttccctgctggcagttcatcagctggatcagccacatggtggccttactggacaaagaccaagccgttgctgttcagcactctgtggaagaaatcactgataactacccgcaggctattgtttatcccttcatcataagcagcgaaagctattccttcaaggatacttctactggtcataagaataaggagtttgtggcaaggattaaaagtaagttggatcaaggaggagtgattcaagattttattaatgccttagatcagctctctaatcctgaactgctctttaaggattggagcaatgatgtaagagctgaactagcaaaaacccctgtaaataaaaaaaacattgaaaaaatgtatgaaagaatgtatgcagccttgggtgacccaaaggctccaggcctgggggcctttagaaggaagtttattcagacttttggaaaagaatttgataaacattttgggaaaggaggttctaaactactgagaatgaagctcagtgacttcaacgacattaccaacatgctacttttaaaaatgaacaaagactcaaagccccctgggaatctgaaagaatgttcaccctggatgagcgacttcaaagtggagttcctgagaaatgagctggagattcccggtcagtatgacggtaggggaaagccattgccagagtaccacgtgcgaatcgccgggtttgatgagcgggtagtcatggcgtctctgcgaaggcccaagcgcatcatcatccgtggccatgacgagagggaacaccctttcctggtgaagggtggcgaggacctgcggcaggaccagcgcgtggagcagctcttccaggtcatgaatgggatcctggcccaagactccgcctgcagccagagggccctgcagctgaggacctatagcgttgtgcccatgacctccagtgatcccagggcaccgccgtgtgaatataaagattggctgacaaaaatgtcaggaaaacatgatgttggagcttacatgctaatgtataagggcgctaatcgtactgaaacagtcacgtcttttagaaaacgagaaagtaaagtgcctgctgatctcttaaagcgggccttcgtgaggatgagtacaagccctgaggctttcctggcgctccgctcccacttcgccagctctcacgctctgatatgcatcagccactggatcctcgggattggagacagacatctgaacaactttatggtggccatggagactggcggcgtgatcgggatcgactttgggcatgcgtttggatccgctacacagtttctgccagtccctgagttgatgccttttcggctaactcgccagtttatcaatctgatgttaccaatgaaagaaacgggccttatgtacagcatcatggtacacgcactccgggccttccgctcagaccctggcctgctcaccaacaccatggatgtgtttgtcaaggagccctcctttgattggaaaaattttgaacagaaaatgctgaaaaaaggagggtcatggattcaagaaataaatgttgctgaaaaaaattggtacccccgacagaaaatatgttacgctaagagaaagttagcaggtgccaatccagcagtcattacttgtgatgagctactcctgggtcatgagaaggcccctgccttcagagactatgtggctgtggcacgaggaagcaaagatcacaacattcgtgcccaagaaccagagagtgggctttcagaagagactcaagtgaagtgcctgatggaccaggcaacagaccccaacatccttggcagaacctgggaaggatgggagccctggatgtgaggtctgtgggagtctgcagatagaaagcattacattgtttaaagaatctactatactttggttggcagcattccatgagctgattttcctgaaacactaaagagaaatgtcttttgtgctacagtttcgtagcatgagtttaaatcaagattatgatgagtaaatgtgtatgggtttgtgatcagctttcaaagcatttacaagtgctgcaagttagtgaaacagctgtctccgtaaatggaggaaatgtggggaagccttggaatgcccttctggttctggcacattggaaagcacactcagaaggcttcatcaccaagattttgggagagtaaagctaagtatagttgatgtaacattgtagaagcagcataggaacaataagaacaataggtaaagctataattatggcttatatttagaaatgactgcatttgatattttaggatatttttctaggttttttcctttcattttattctcttctagttttgacattttatgatagatttgctctctagaaggaaacgtctttatttaggagggcaaaaattttggtcatagcattcacttttgctattccaatctacaactggaagatacataaaagtgctttgcattgaatttgggataacttcaaaaatcccatggttgttgttagggatagtactaagcatttcagttccaggagaataaaagaaattcctatttgaaatgaattcctcatttggaggaaaaaaagcatgcattctagcacaacaagatgaaattatggaatacaaaagtggctccttcccatgtgcagtccctgtccccccccgccagtcctccacacccaaactgtttctgat

SEQ ID NO: 1058 - DNA, 12603 bp, Homo sapiens
gcggcatggcgggctccggagccggtgtgcgttgctccctgctgcggctgcaggagaccttgtccgctgcggaccgctgcggtgctgccctggccggtcatcaactgatccgcggcctggggcaggaatgcgtcctgagcagcagccccgcggtgctggcattacagacatctttagttttttccagagatttcggtttgcttgtatttgtccggaagtcactcaacagtattgaatttcgtgaatgtagagaagaaatcctaaagtttttatgtattttcttagaaaaaatgggccagaagatcgcaccttactctgttgaaattaagaacacttgtaccagtgtttatacaaaagatagagctgctaaatgtaaaattccagccctggaccttcttattaagttacttcagacttttagaagttctagactcatggatgaatttaaaattggagaattatttagtaaattctatggagaacttgcattgaaaaaaaaaataccagatacagttttagaaaaagtatatgagctcctaggattattgggtgaagttcatcctagtgagatgataaataatgcagaaaacctgttccgcgcttttctgggtgaacttaagacccagatgacatcagcagtaagagagcccaaactacctgttctggcaggatgtctgaaggggttgtcctcacttctgtgcaacttcactaagtccatggaagaagatccccagacttcaagggagatttttaattttgtactaaaggcaattcgtcctcagattgatctgaagagatatgctgtgccctcagctggcttgcgcctatttgccctgcatgcatctcagtttagcacctgccttctggacaactacgtgtctctatttgaagtcttgttaaagtggtgtgcccacacaaatgtagaattgaaaaaagctgcactttcagccctggaatcctttctgaaacaggtttctaatatggtggcgaaaaatgcagaaatgcataaaaataaactgcagtactttatggagcagttttatggaatcatcagaaatgtggattcgaacaacaaggagttatctattgctatccgtggatatggactttttgcaggaccgtgcaaggttataaacgcaaaagatgttgacttcatgtacgttgagctcattcagcgctgcaagcagatgttcctcacccagacagacactggtgactaccgtgtttatcagatgccaagcttcctccagtctgttgcaagcgtcttgctgtaccttgacacagttcctgaggtgtatactccagttctggagcacctcgtggtgatgcagatagacagtttcccacagtacagtccaaaaatgcagctggtgtgttgcagagccatagtgaaggtgttcctagctttggcagcaaaagggccagttctcaggaattgcattagtactgtggtgcatcagggtttaatcagaatatgttctaaaccagtggtccttccaaagggccctgagtctgaatctgaagaccaccgtgcttcaggggaagtcagaactggcaaatggaaggtgcccacatacaaagactacgtggatctcttcagacatctcctgagctctgaccagatgatggattctattttagcagatgaagcatttttctctgtgaattcctccagtgaaagtctgaatcatttactttatgatgaatttgtaaaatccgttttgaagattgttgagaaattggatcttacacttgaaatacagactgttggggaacaagagaatggagatgaggcgcctggtgtttggatgatcccaacttcagatccagcggctaacttgcatccagctaaacctaaagatttttcggctttcattaacctggtggaattttgcagagagattctccctgagaaacaagcagaattttttgaaccatgggtgtactcattttcatatgaattaattttgcaatctacaaggttgcccctcatcagtggtttctacaaattgctttctattacagtaagaaatgccaagaaaataaaatatttcgagggagttagtccaaagagtctgaaacactctcctgaagacccagaaaagtattcttgctttgctttatttgtgaaatttggcaaagaggtggcagttaaaatgaagcagtacaaagatgaacttttggcctcttgtttgacctttcttctgtccttgccacacaacatcattgaactcgatgttagagcctacgttcctgcactgcagatggctttcaaactgggcctgagctatacccccttggcagaagtaggcctgaatgctctagaagaatggtcaatttatattgacagacatgtaatgcagccttattacaaagacattctcccctgcctggatggatacctgaagacttcagccttgtcagatgagaccaagaataactgggaagtgtcagctctttctcgggctgcccagaaaggatttaataaagtggtgttaaagcatctgaagaagacaaagaacctttcatcaaacgaagcaatatccttagaagaaataagaattagagtagtacaaatgcttggatctctaggaggacaaataaacaaaaatcttctgacagtcacgtcctcagatgagatgatgaagagctatgtggcctgggacagagagaagcggctgagctttgcagtgccctttagagagatgaaacctgtcattttcctggatgtgttcctgcctcgagtcacagaattagcgctcacagccagtgacagacaaactaaagttgcagcctgtgaacttttacatagcatggttatgtttatgttgggcaaagccacgcagatgccagaagggggacagggagccccacccatgtaccagctctataagcggacgtttcctgtgctgcttcgacttgcgtgtgatgttgatcaggtgacaaggcaactgtatgagccactagttatgcagctgattcactggttcactaacaacaagaaatttgaaagtcaggatactgtttccttactagaagctatattggatggaattgtggaccctgttgacagtactttaagagatttttgtggtcggtgtattcgagaattccttaaatggtccattaagcaaataacaccacagcagcaggagaagagtccagtaaacaccaaatcgcttttcaagcgactttatagccttgcgcttcaccccaatgctttcaagaggctgggagcatcacttgcctttaataatatctacagggaattcagggaagaagagtctctggtggaacagtttgtgtttgaagccttggtgatatacatggagagtctggccttagcacatgcagatgagaagtccttaggtacaattcaacagtgttgtgatgccattgatcacctatgccgcatcattgaaaagaagcatgtttctttaaataaagcaaagaaacgacgtttgccgcgaggatttccaccttccgcatcattgtgtttattggatctggtcaagtggcttttagctcattgtgggaggccccagacagaatgtcgacacaaatccattgaactcttttataaattcgttcctttattgccaggcaacagatcccctaatttgtggctgaaagatgttctcaaggaagaaggtgtctcttttctcatcaacacctttgaggggggtggctgtggccagccctcgggcatcctggcccagcccaccctcttgtaccttcgggggccattcagcctgcaggccacgctatgctggctggacctgctcctggccgcgttggagtgctacaacacgttcattggcgagagaactgtaggagcgctccaggtcctaggtactgaagcccagtcttcacttttgaaagcagtggctttcttcttagaaagcattgccatgcatgacattatagcagcagaaaagtgctttggcactggggcagcaggtaacagaacaagcccacaagagggagaaaggtacaactacagcaaatgcaccgttgtggtccggattatggagtttaccacgactctgctaaacacctccccggaaggatggaagctcctgaagaaggacttgtgtaatacacacctgatgagagtcctggtgcagacgctgtgtgagcccgcaagcataggtttcaacatcggagacgtccaggttatggctcatcttcctgatgtttgtgtgaatctgatgaaagctctaaagatgtccccatacaaagatatcctagagacccatctgagagagaaaataacagcacagagcattgaggagctttgtgccgtcaacttgtatggccctgacgcgcaagtggacaggagcaggctggctgctgttgtgtctgcctgtaaacagcttcacagagctgggcttctgcataatatattaccgtctcagtccacagatttgcatcattctgttggcacagaacttctttccctggtttataaaggcattgcccctggagatgagagacagtgtctgccttctctagacctcagttgtaagcagctggccagcggacttctggagttagcctttgcttttggaggactgtgtgagcgccttgtgagtcttctcctgaacccagcggtgctgtccacggcgtccttgggcagctcacagggcagcgtcatccacttctcccatggggagtatttctatagcttgttctcagaaacgatcaacacggaattattgaaaaatctggatcttgctgtattggagctcatgcagtcttcagtggataataccaaaatggtgagtgccgttttgaacggcatgttagaccagagcttcagggagcgagcaaaccagaaacaccaaggactgaaacttgcgactacaattctgcaacactggaagaagtgtgattcatggtgggccaaagattcccctctcgaaactaaaatggcagtgctggccttactggcaaaaattttacagattgattcatctgtatcttttaatacaagtcatggttcattccctgaagtctttacaacatatattagtctacttgctgacacaaagctggatctacatttaaagggccaagctgtcactcttcttccattcttcaccagcctcactggaggcagtctggaggaacttagacgtgttctggagcagctcatcgttgctcacttccccatgcagtccagggaatttcctccaggaactccgcggttcaataattatgtggactgcatgaaaaagtttctagatgcattggaattatctcaaagccctatgttgttggaattgatgacagaagttctttgtcgggaacagcagcatgtcatggaagaattatttcaatccagtttcaggaggattgccagaaggggttcatgtgtcacacaagtaggccttctggaaagcgtgtatgaaatgttcaggaaggatgacccccgcctaagtttcacacgccagtcctttgtggaccgctccctcctcactctgctgtggcactgtagcctggatgctttgagagaattcttcagcacaattgtggtggatgccattgatgtgttgaagtccaggtttacaaagctaaatgaatctacctttgatactcaaatcaccaagaagatgggctactataagattctagacgtgatgtattctcgccttcccaaagatgatgttcatgctaaggaatcaaaaattaatcaagttttccatggctcgtgtattacagaaggaaatgaacttacaaagacattgattaaattgtgctacgatgcatttacagagaacatggcaggagagaatcagctgctggagaggagaagactttaccattgtgcagcatacaactgcgccatatctgtcatctgctgtgtcttcaatgagttaaaattttaccaaggttttctgtttagtgaaaaaccagaaaagaacttgcttatttttgaaaatctgatcgacctgaagcgccgctataattttcctgtagaagttgaggttcctatggaaagaaagaaaaagtacattgaaattaggaaagaagccagagaagcagcaaatggggattcagatggtccttcctatatgtcttccctgtcatatttggcagacagtaccctgagtgaggaaatgagtcaatttgatttctcaaccggagttcagagctattcatacagctcccaagaccctagacctgccactggtcgttttcggagacgggagcagcgggaccccacggtgcatgatgatgtgctggagctggagatggacgagctcaatcggcatgagtgcatggcgcccctgacggccctggtcaagcacatgcacagaagcctgggcccgcctcaaggagaagaggattcagtgccaagagatcttccttcttggatgaaattcctccatggcaaactgggaaatccaatagtaccattaaatatccgtctcttcttagccaagcttgttattaatacagaagaggtctttcgcccttacgcgaagcactggcttagccccttgctgcagctggctgcttctgaaaacaatggaggagaaggaattcactacatggtggttgagatagtggccactattctttcatggacaggcttggccactccaacaggggtccctaaagatgaagtgttagcaaatcgattgcttaatttcctaatgaaacatgtctttcatccaaaaagagctgtgtttagacacaaccttgaaattataaagacccttgtcgagtgctggaaggattgtttatccatcccttataggttaatatttgaaaagttttccggtaaagatcctaattctaaagacaactcagtagggattcaattgctaggcatcgtgatggccaatgacctgcctccctatgacccacagtgtggcatccagagtagcgaatacttccaggctttggtgaataatatgtcctttgtaagatataaagaagtgtatgccgctgcagcagaagttctaggacttatacttcgatatgttatggagagaaaaaacatactggaggagtctctgtgtgaactggttgcgaaacaattgaagcaacatcagaatactatggaggacaagtttattgtgtgcttgaacaaagtgaccaagagcttccctcctcttgcagacaggttcatgaatgctgtgttctttctgctgccaaaatttcatggagtgttgaaaacactctgtctggaggtggtactttgtcgtgtggagggaatgacagagctgtacttccagttaaagagcaaggacttcgttcaagtcatgagacatagagatgaaagacaaaaagtatgtttggacataatttataagatgatgccaaagttaaaaccagtagaactccgagaacttctgaaccccgttgtggaattcgtttcccatccttctacaacatgtagggaacaaatgtataatattctcatgtggattcatgataattacagagatccagaaagtgagacagataatgactcccaggaaatatttaagttggcaaaagatgtgctgattcaaggattgatcgatgagaaccctggacttcaattaattattcgaaatttctggagccatgaaactaggttaccttcaaataccttggaccggttgctggcactaaattccttatattctcctaagatagaagtgcactttttaagtttagcaacaaattttctgctcgaaatgaccagcatgagcccagattatccaaaccccatgttcgagcatcctctgtcagaatgcgaatttcaggaatataccattgattctgattggcgtttccgaagtactgttctcactccgatgtttgtggagacccaggcctcccagggcactctccagacccgtacccaggaagggtccctctcagctcgctggccagtggcagggcagataagggccacccagcagcagcatgacttcacactgacacagactgcagatggaagaagctcatttgattggctgaccgggagcagcactgacccgctggtcgaccacaccagtccctcatctgactccttgctgtttgcccacaagaggagtgaaaggttacagagagcacccttgaagtcagtggggcctgattttgggaaaaaaaggctgggccttccaggggacgaggtggataacaaagtgaaaggtgcggccggccggacggacctactacgactgcgcagacggtttatgagggaccaggagaagctcagtttgatgtatgccagaaaaggcgttgctgagcaaaaacgagagaaggaaatcaagagtgagttaaaaatgaagcaggatgcccaggtcgttctgtacagaagctaccggcacggagaccttcctgacattcagatcaagcacagcagcctcatcaccccgttacaggccgtggcccagagggacccaataattgcaaaacagctctttagcagcttgttttctggaattttgaaagagatggataaatttaagacactgtctgaaaaaaacaacatcactcaaaagttgcttcaagacttcaatcgttttcttaataccaccttctctttctttccaccctttgtctcttgtattcaggacattagctgtcagcacgcagccctgctgagcctcgacccagcggctgttagcgctggttgcctggccagcctacagcagcccgtgggcatccgcctgctagaggaggctctgctccgcctgctgcctgctgagctgcctgccaagcgagtccgtgggaaggcccgcctccctcctgatgtcctcagatgggtggagcttgctaagctgtatagatcaattggagaatacgacgtcctccgtgggatttttaccagtgagataggaacaaagcaaatcactcagagtgcattattagcagaagccagaagtgattattctgaagctgctaagcagtatgatgaggctctcaataaacaagactgggtagatggtgagcccacagaagccgagaaggatttttgggaacttgcatcccttgactgttacaaccaccttgctgagtggaaatcacttgaatactgttctacagccagtatagacagtgagaaccccccagacctaaataaaatctggagtgaaccattttatcaggaaacatatctaccttacatgatccgcagcaagctgaagctgctgctccagggagaggctgaccagtccctgctgacatttattgacaaagctatgcacggggagctccagaaggcgattctagagcttcattacagtcaagagctgagtctgctttacctcctgcaagatgatgttgacagagccaaatattacattcaaaatggcattcagagttttatgcagaattattctagtattgatgtcctcttacaccaaagtagactcaccaaattgcagtctgtacaggctttaacagaaattcaggagttcatcagctttataagcaaacaaggcaatttatcatctcaagttccccttaagagacttctgaacacctggacaaacagatatccagatgctaaaatggacccaatgaacatctgggatgacatcatcacaaatcgatgtttctttctcagcaaaatagaggagaagcttacccctcttccagaagataatagtatgaatgtggatcaagatggagaccccagtgacaggatggaagtgcaagagcaggaagaagatatcagctccctgatcaggagttgcaagttttccatgaaaatgaagatgatagacagtgcccggaagcagaacaatttctcacttgctatgaaactactgaaggagctgcataaagagtcaaaaaccagagacgattggctggtgagctgggtgcagagctactgccgcctgagccactgccggagccggtcccagggctgctctgagcaggtgctcactgtgctgaaaacagtctctttgttggatgagaacaacgtgtcaagctacttaaacaaaaatattctggctttccgtgaccagaacattctcttgggtacaacttacaggatcatagcgaatgctctcagcagtgagccagcctgccttgctgaaatcgaggaggacaaggctagaagaatcttagagctttctggatccagttcagaggattcagagaaggtgatcgcgggtctgtaccagagagcattccagcacctctctgaggctgtgcaggcggctgaggaggaggcccagcctccctcctggagctgtgggcctgcagctggggtgattgatgcttacatgacgctggcagatttctgtgaccaacagctgcgcaaggaggaagagaatgcatcagttactgattctgcagaactgcaggcgtatccagcacttgtggtggagaaaatgttgaaagctttaaaattaaattccaatgaagccagattgaagtttcctagattacttcagattatagaacggtatccagaggagactttgagcctcatgacaaaagagatctcttccgttccctgctggcagttcatcagctggatcagccacatggtggccttactggacaaagaccaagccgttgctgttcagcactctgtggaagaaatcactgataactacccgcaggctattgtttatcccttcatcataagcagcgaaagctattccttcaaggatacttctactggtcataagaataaggagtttgtggcaaggattaaaagtaagttggatcaaggaggagtgattcaagattttattaatgccttagatcagctctctaatcctgaactgctctttaaggattggagcaatgatgtaagagctgaactagcaaaaacccctgtaaataaaaaaaacattgaaaaaatgtatgaaagaatgtatgcagccttgggtgacccaaaggctccaggcctgggggcctttagaaggaagtttattcagacttttggaaaagaatttgataaacattttgggaaaggaggttctaaactactgagaatgaagctcagtgacttcaacgacattaccaacatgctacttttaaaaatgaacaaagactcaaagccccctgggaatctgaaagaatgttcaccctggatgagcgacttcaaagtggagttcctgagaaatgagctggagattcccggtcagtatgacggtaggggaaagccattgccagagtaccacgtgcgaatcgccgggtttgatgagcgggtgacagtcatggcgtctctgcgaaggcccaagcgcatcatcatccgtggccatgacgagagggaacaccctttcctggtgaagggtggcgaggacctgcggcaggaccagcgcgtggagcagctcttccaggtcatgaatgggatcctggcccaagactccgcctgcagccagagggccctgcagctgaggacctatagcgttgtgcccatgacctccagtgatcccagggcaccgccgtgtgaatataaagattggctgacaaaaatgtcaggaaaacatgatgttggagcttacatgctaatgtataagggcgctaatcgtactgaaacagtcacgtcttttagaaaacgagaaagtaaagtgcctgctgatctcttaaagcgggccttcgtgaggatgagtacaagccctgaggctttcctggcgctccgctcccacttcgccagctctcacgctctgatatgcatcagccactggatcctcgggattggagacagacatctgaacaactttatggtggccatggagactggcggcgtgatcgggatcgactttgggcatgcgtttggatccgctacacagtttctgccagtccctgagttgatgccttttcggctaactcgccagtttatcaatctgatgttaccaatgaaagaaacgggccttatgtacagcatcatggtacacgcactccgggccttccgctcagaccctggcctgctcaccaacaccatggatgtgtttgtcaaggagccctcctttgattggaaaaattttgaacagaaaatgctgaaaaaaggagggtcatggattcaagaaataaatgttgctgaaaaaaattggtacccccgacagaaaatatgttacgctaagagaaagttagcaggtgccaatccagcagtcattacttgtgatgagctactcctgggtcatgagaaggcccctgccttcagagactatgtggctgtggcacgaggaagcaaagatcacaacattcgtgcccaagaaccagagagtgggctttcagaagagactcaagtgaagtgcctgatggaccaggcaacagaccccaacatccttggcagaacctgggaaggatgggagccctggatgtgaggtctgtgggagtctgcagatagaaagcattacattgtttaaagaatctactatacttggttggcagcattccatgagctgattttcctgaaacactaaagagaaatgtcttttgtgctacagtttcgtagcatgagtttaaatcaagattatgatgagtaaatgtgtatgggttaaatcaaagataaggttatagtaacatcaaagattaggtgaggtttatagaaagatagatatccaggcttaccaaagtattaagtcaagaatataatatgtgatcagctttcaaagcatttacaagtgctgc

SEQ ID NO: 1059 - DNA, 13449 bp, Homo sapiens
atggcgggctccggagccggtgtgcgttgctccctgctgcggctgcaggagaccttgtccgctgcggaccgctgcggtgctgccctggccggtcatcaactgatccgcggcctggggcaggaatgcgtcctgagcagcagccccgcggtgctggcattacagacatctttagttttttccagagatttcggtttgcttgtatttgtccggaagtcactcaacagtattgaatttcgtgaatgtagagaagaaatcctaaagtttttatgtattttcttagaaaaaatgggccagaagatcgcaccttactctgttgaaattaagaacacttgtaccagtgtttatacaaaagatagagctgctaaatgtaaaattccagccctggaccttcttattaagttacttcagacttttagaagttctagactcatggatgaatttaaaattggagaattatttagtaaattctatggagaacttgcattgaaaaaaaaaataccagatacagttttagaaaaagtatatgagctcctaggattattgggtgaagttcatcctagtgagatgataaataatgcagaaaacctgttccgcgcttttctgggtgaacttaagacccagatgacatcagcagtaagagagcccaaactacctgttctggcaggatgtctgaaggggttgtcctcacttctgtgcaacttcactaagtccatggaagaagatccccagacttcaagggagatttttaattttgtactaaaggcaattcgtcctcagattgatctgaagagatatgctgtgccctcagctggcttgcgcctatttgccctgcatgcatctcagtttagcacctgccttctggacaactacgtgtctctatttgaagtcttgttaaagtggtgtgcccacacaaatgtagaattgaaaaaagctgcactttcagccctggaatcctttctgaaacaggtttctaatatggtggcgaaaaatgcagaaatgcataaaaataaactgcagtactttatggagcagttttatggaatcatcagaaatgtggattcgaacaacaaggagttatctattgctatccgtggatatggactttttgcaggaccgtgcaaggttataaacgcaaaagatgttgacttcatgtacgttgagctcattcagcgctgcaagcagatgttcctcacccagacagacactggtgacgaccgtgtttatcagatgccaagcttcctccagtctgttgcaagcgtcttgctgtaccttgacacagttcctgaggtgtatactccagttctggagcacctcgtggtgatgcagatagacagtttcccacagtacagtccaaaaatgcagctggtgtgttgcagagccatagtgaaggtgttcctagctttggcagcaaaagggccagttctcaggaattgcattagtactgtggtgcatcagggtttaatcagaatatgttctaaaccagtggtccttccaaagggccctgagtctgaatctgaagaccaccgtgcttcaggggaagtcagaactggcaaatggaaggtgcccacatacaaagactacgtggatctcttcagacatctcctgagctctgaccagatgatggattctattttagcagatgaagcatttttctctgtgaattcctccagtgaaagtctgaatcatttactttatgatgaatttgtaaaatccgttttgaagattgttgagaaattggatcttacacttgaaatacagactgttggggaacaagagaatggagatgaggcgcctggtgtttggatgatcccaacttcagatccagcggctaacttgcatccagctaaacctaaagatttttcggctttcattaacctggtggaattttgcagagagattctccctgagaaacaagcagaattttttgaaccatgggtgtactcattttcatatgaattaattttgcaatctacaaggttgcccctcatcagtggtttctacaaattgctttctattacagtaagaaatgccaagaaaataaaatatttcgagggagttagtccaaagagtctgaaacactctcctgaagacccagaaaagtattcttgctttgctttatttgtgaaatttggcaaagaggtggcagttaaaatgaagcagtacaaagatgaacttttggcctcttgtttgacctttcttctgtccttgccacacaacatcattgaactcgatgttagagcctacgttcctgcactgcagatggctttcaaactgggcctgagctatacccccttggcagaagtaggcctgaatgctctagaagaatggtcaatttatattgacagacatgtaatgcagccttattacaaagacattctcccctgcctggatggatacctgaagacttcagccttgtcagatgagaccaagaataactgggaagtgtcagctctttctcgggctgcccagaaaggatttaataaagtggtgttaaagcatctgaagaagacaaagaacctttcatcaaacgaagcaatatccttagaagaaataagaattagagtagtacaaatgcttggatctctaggaggacaaataaacaaaaatcttctgacagtcacgtcctcagatgagatgatgaagagctatgtggcctgggacagagagaagcggctgagctttgcagtgccctttagagagatgaaacctgtcattttcctggatgtgttcctgcctcgagtcacagaattagcgctcacagccagtgacagacaaactaaagttgcagcctgtgaacttttacatagcatggttatgtttatgttgggcaaagccacgcagatgccagaagggggacagggagccccacccatgtaccagctctataagcggacgtttcctgtgctgcttcgacttgcgtgtgatgttgatcaggtgacaaggcaactgtatgagccactagttatgcagctgattcactggttcactaacaacaagaaatttgaaagtcaggatactgttgccttactagaagctatattggatggaattgtggaccctgttgacagtactttaagagatttttgtggtcggtgtattcgagaattccttaaatggtccattaagcaaataacaccacagcagcaggagaagagtccagtaaacaccaaatcgcttttcaagcgactttatagccttgcgcttcaccccaatgctttcaagaggctgggagcatcacttgcctttaataatatctacagggaattcagggaagaagagtctctggtggaacagtttgtgtttgaagccttggtgatatacatggagagtctggccttagcacatgcagatgagaagtccttaggtacaattcaacagtgttgtgatgccattgatcacctatgccgcatcattgaaaagaagcatgtttctttaaataaagcaaagaaacgacgtttgccgcgaggatttccaccttccgcatcattgtgtttattggatctggtcaagtggcttttagctcattgtgggaggccccagacagaatgtcgacacaaatccattgaactcttttataaattcgttcctttattgccaggcaacagatcccctaatttgtggctgaaagatgttctcaaggaagaaggtgtctcttttctcatcaacacctttgaggggggtggctgtggccagccctcgggcatcctggcccagcccaccctcttgtaccttcgggggccattcagcctgcaggccacgctatgctggctggacctgctcctggccgcgttggagtgctacaacacgttcattggcgagagaactgtaggagcgctccaggtcctaggtactgaagcccagtcttcacttttgaaagcagtggctttcttcttagaaagcattgccatgcatgacattatagcagcagaaaagtgctttggcactggggcagcaggtaacagaacaagcccacaagagggagaaaggtacaactacagcaaatgcaccgttgtggtccggattatggagtttaccacgactctgctaaacacctccccggaaggatggaagctcctgaagaaggacttgtgtaatacacacctgatgagagtcctggtgcagacgctgtgtgagcccgcaagcataggtttcaacatcggagacgtccaggttatggctcatcttcctgatgtttgtgtgaatctgatgaaagctctaaagatgtccccatacaaagatatcctagagacccatctgagagagaaaataacagcacagagcattgaggagctttgtgccgtcaacttgtatggccctgacgcgcaagtggacaggagcaggctggctgctgttgtgtctgcctgtaaacagcttcacagagctgggcttctgcataatatattaccgtctcagtccacagatttgcatcattctgttggcacagaacttctttccctggtttataaaggcattgcccctggagatgagagacagtgtctgccttctctagacctcagttgtaagcagctggccagcggacttctggagttagcctttgcttttggaggactgtgtgagcgccttgtgagtcttctcctgaacccagcggtgctgtccacggcgtccttgggcagctcacagggcagcgtcatccacttctcccatggggagtatttctatagcttgttctcagaaacgatcaacacggaattattgaaaaatctggatcttgctgtattggagctcatgcagtcttcagtggataataccaaaatggtgagtgccgttttgaacggcatgttagaccagagcttcagggagcgagcaaaccagaaacaccaaggactgaaacttgcgactacaattctgcaacactggaagaagtgtgattcatggtgggccaaagattcccctctcgaaactaaaatggcagtgctggccttactggcaaaaattttacagattgattcatctgtatcttttaatacaagtcatggttcattccctgaagtctttacaacatatattagtctacttgctgacacaaagctggatctacatttaaagggccaagctgtcactcttcttccattcttcaccagcctcactggaggcagtctggaggaacttagacgtgttctggagcagctcatcgttgctcacttccccatgcagtccagggaatttcctccaggaactccgcggttcaataattatgtggactgcatgaaaaagtttctagatgcattggaattatctcaaagccctatgttgttggaattgatgacagaagttctttgtcgggaacagcagcatgtcatggaagaattatttcaatccagtttcaggaggattgccagaaggggttcatgtgtcacacaagtaggccttctggaaagcgtgtatgaaatgttcaggaaggatgacccccgcctaagtttcacacgccagtcctttgtggaccgctccctcctcactctgctgtggcactgtagcctggatgctttgagagaattcttcagcacaattgtggtggatgccattgatgtgttgaagtccaggtttacaaagctaaatgaatctacctttgatactcaaatcaccaagaagatgggctactataagattctagacgtgatgtattctcgccttcccaaagatgatgttcatgctaaggaatcaaaaattaatcaagttttccatggctcgtgtattacagaaggaaatgaacttacaaagacattgattaaattgtgctacgatgcatttacagagaacatggcaggagagaatcagctgctggagaggagaagactttaccattgtgcagcatacaactgcgccatatctgtcatctgctgtgtcttcaatgagttaaaattttaccaaggttttctgtttagtgaaaaaccagaaaagaacttgcttatttttgaaaatctgatcgacctgaagcgccgctataattttcctgtagaagttgaggttcctatggaaagaaagaaaaagtacattgaaattaggaaagaagccagagaagcagcaaatggggattcagatggtccttcctatatgtcttccctgtcatatttggcagacagtaccctgagtgaggaaatgagtcaatttgatttctcaaccggagttcagagctattcatacagctcccaagaccctagacctgccactggtcgttttcggagacgggagcagcgggaccccacggtgcatgatgatgtgctggagctggagatggacgagctcaatcggcatgagtgcatggcgcccctgacggccctggtcaagcacatgcacagaagcctgggcccgcctcaaggagaagaggattcagtgccaagagatcttccttcttggatgaaattcctccatggcaaactgggaaatccaatagtaccattaaatatccgtctcttcttagccaagcttgttattaatacagaagaggtctttcgcccttacgcgaagcactggcttagccccttgctgcagctggctgcttctgaaaacaatggaggagaaggaattcactacatggtggttgagatagtggccactattctttcatggacaggcttggccactccaacaggggtccctaaagatgaagtgttagcaaatcgattgcttaatttcctaatgaaacatgtctttcatccaaaaagagctgtgtttagacacaaccttgaaattataaagacccttgtcgagtgctggaaggattgtttatccatcccttataggttaatatttgaaaagttttccggtaaagatcctaattctaaagacaactcagtagggattcaattgctaggcatcgtgatggccaatgacctgcctccctatgacccacagtgtggcatccagagtagcgaatacttccaggctttggtgaataatatgtcctttgtaagatataaagaagtgtatgccgctgcagcagaagttctaggacttatacttcgatatgttatggagagaaaaaacatactggaggagtctctgtgtgaactggttgcgaaacaattgaagcaacatcagaatactatggaggacaagtttattgtgtgcttgaacaaagtgaccaagagcttccctcctcttgcagacaggttcatgaatgctgtgttctttctgctgccaaaatttcatggagtgttgaaaacactctgtctggaggtggtactttgtcgtgtggagggaatgacagagctgtacttccagttaaagagcaaggacttcgttcaagtcatgagacatagagatgatgaaagacaaaaagtatgtttggacataatttataagatgatgccaaagttaaaaccagtagaactccgagaacttctgaaccccgttgtggaattcgtttcccatccttctacaacatgtagggaacaaatgtataatattctcatgtggattcatgataattacagagatccagaaagtgagacagataatgactcccaggaaatatttaagttggcaaaagatgtgctgattcaaggattgatcgatgagaaccctggacttcaattaattattcgaaatttctggagccatgaaactaggttaccttcaaataccttggaccggttgctggcactaaattccttatattctcctaagatagaagtgcactttttaagtttagcaacaaattttctgctcgaaatgaccagcatgagcccagattatccaaaccccatgttcgagcatcctctgtcagaatgcgaatttcaggaatataccattgattctgattggcgtttccgaagtactgttctcactccgatgtttgtggagacccaggcctcccagggcactctccagacccgtacccaggaagggtccctctcagctcgctggccagtggcagggcagataagggccacccagcagcagcatgacttcacactgacacagactgcagatggaagaagctcatttgattggctgaccgggagcagcactgacccgctggtcgaccacaccagtccctcatctgactccttgctgtttgcccacaagaggagtgaaaggttacagagagcacccttgaagtcagtggggcctgattttgggaaaaaaaggctgggccttccaggggacgaggtggataacaaagtgaaaggtgcggccggccggacggacctactacgactgcgcagacggtttatgagggaccaggagaagctcagtttgatgtatgccagaaaaggcgttgctgagcaaaaacgagagaaggaaatcaagagtgagttaaaaatgaagcaggatgcccaggtcgttctgtacagaagctaccggcacggagaccttcctgacattcagatcaagcacagcagcctcatcaccccgttacaggccgtggcccagagggacccaataattgcaaaacagctctttagcagcttgttttctggaattttgaaagagatggataaatttaagacactgtctgaaaaaaacaacatcactcaaaagttgcttcaagacttcaatcgttttcttaataccaccttctctttctttccaccctttgtctcttgtattcaggacattagctgtcagcacgcagccctgctgagcctcgacccagcggctgttagcgctggttgcctggccagcctacagcagcccgtgggcatccgcctgctagaggaggctctgctccgcctgctgcctgctgagctgcctgccaagcgagtccgtgggaaggcccgcctccctcctgatgtcctcagatgggtggagcttgctaagctgtatagatcaattggagaatacgacgtcctccgtgggatttttaccagtgagataggaacaaagcaaatcactcagagtgcattattagcagaagccagaagtgattattctgaagctgctaagcagtatgatgaggctctcaataaacaagactgggtagatggtgagcccacagaagccgagaaggatttttgggaacttgcatcccttgactgttacaaccaccttgctgagtggaaatcacttgaatactgttctacagccagtatagacagtgagaaccccccagacctaaataaaatctggagtgaaccattttatcaggaaacatatctaccttacatgatccgcagcaagctgaagctgctgctccagggagaggctgaccagtccctgctgacatttattgacaaagctatgcacggggagctccagaaggcgattctagagcttcattacagtcaagagctgagtctgctttacctcctgcaagatgatgttgacagagccaaatattacattcaaaatggcattcagagttttatgcagaattattctagtattgatgtcctcttacaccaaagtagactcaccaaattgcagtctgtacaggctttaacagaaattcaggagttcatcagctttataagcaaacaaggcaatttatcatctcaagttccccttaagagacttctgaacacctggacaaacagatatccagatgctaaaatggacccaatgaacatctgggatgacatcatcacaaatcgatgtttctttctcagcaaaatagaggagaagcttacccctcttccagaagataatagtatgaatgtggatcaagatggagaccccagtgacaggatggaagtgcaagagcaggaagaagatatcagctccctgatcaggagttgcaagttttccatgaaaatgaagatgatagacagtgcccggaagcagaacaatttctcacttgctatgaaactactgaaggagctgcataaagagtcaaaaaccagagacgattggctggtgagctgggtgcagagctactgccgcctgagccactgccggagccggtcccagggctgctctgagcaggtgctcactgtgctgaaaacagtctctttgttggatgagaacaacgtgtcaagctacttaagcaaaaatattctggctttccgtgaccagaacattctcttgggtacaacttacaggatcatagcgaatgctctcagcagtgagccagcctgccttgctgaaatcgaggaggacaaggctagaagaatcttagagctttctggatccagttcagaggattcagagaaggtgatcgcgggtctgtaccagagagcattccagcacctctctgaggctgtgcaggcggctgaggaggaggcccagcctccctcctggagctgtgggcctgcagctggggtgattgatgcttacatgacgctggcagatttctgtgaccaacagctgcgcaaggaggaagagaatgcatcagttattgattctgcagaactgcaggcgtatccagcacttgtggtggagaaaatgttgaaagctttaaaattaaattccaatgaagccagattgaagtttcctagattacttcagattatagaacggtatccagaggagactttgagcctcatgacaaaagagatctcttccgttccctgctggcagttcatcagctggatcagccacatggtggccttactggacaaagaccaagccgttgctgttcagcactctgtggaagaaatcactgataactacccgcaggctattgtttatcccttcatcataagcagcgaaagctattccttcaaggatacttctactggtcataagaataaggagtttgtggcaaggattaaaagtaagttggatcaaggaggagtgattcaagattttattaatgccttagatcagctctctaatcctgaactgctctttaaggattggagcaatgatgtaagagctgaactagcaaaaacccctgtaaataaaaaaaacattgaaaaaatgtatgaaagaatgtatgcagccttgggtgacccaaaggctccaggcctgggggcctttagaaggaagtttattcagacttttggaaaagaatttgataaacattttgggaaaggaggttctaaactactgagaatgaagctcagtgacttcaacgacattaccaacatgctacttttaaaaatgaacaaagactcaaagccccctgggaatctgaaagaatgttcaccctggatgagcgacttcaaagtggagttcctgagaaatgagctggagattcccggtcagtatgacggtaggggaaagccattgccagagtaccacgtgcgaatcgccgggtttgatgagcgggtgacagtcatggcgtctctgcgaaggcccaagcgcatcatcatccgtggccatgacgagagggaacaccctttcctggtgaagggtggcgaggacctgcggcaggaccagcgcgtggagcagctcttccaggtcatgaatgggatcctggcccaagactccgcctgcagccagagggccctgcagctgaggacctatagcgttgtgcccatgacctccaggttaggattaattgagtggcttgaaaatactgttaccttgaaggaccttcttttgaacaccatgtcccaagaggagaaggcggcttacctgagtgatcccagggcaccgccgtgtgaatataaagattggctgacaaaaatgtcaggaaaacatgatgttggagcttacatgctaatgtataagggcgctaatcgtactgaaacagtcacgtcttttagaaaacgagaaagtaaagtgcctgctgatctcttaaagcgggccttcgtgaggatgagtacaagccctgaggctttcctggcgctccgctcccacttcgccagctctcacgctctgatatgcatcagccactggatcctcgggattggagacagacatctgaacaactttatggtggccatggagactggcggcgtgatcgggatcgactttgggcatgcgtttggatccgctacacagtttctgccagtccctgagttgatgccttttcggctaactcgccagtttatcaatctgatgttaccaatgaaagaaacgggccttatgtacagcatcatggtacacgcactccgggccttccgctcagaccctggcctgctcaccaacaccatggatgtgtttgtcaaggagccctcctttgattggaaaaattttgaacagaaaatgctgaaaaaaggagggtcatggattcaagaaataaatgttgctgaaaaaaattggtacccccgacagaaaatatgttacgctaagagaaagttagcaggtgccaatccagcagtcattacttgtgatgagctactcctgggtcatgagaaggcccctgccttcagagactatgtggctgtggcacgaggaagcaaagatcacaacattcgtgcccaagaaccagagagtgggctttcagaagagactcaagtgaagtgcctgatggaccaggcaacagaccccaacatccttggcagaacctgggaaggatgggagccctggatgtgaggtctgtgggagtctgcagatagaaagcattacattgtttaaagaatctactatactttggttggcagcattccatgagctgattttcctgaaacactaaagagaaatgtcttttgtgctacagtttcgtagcatgagtttaaatcaagattatgatgagtaaatgtgtatgggttaaatcaaagataaggttatagtaacatcaaagattaggtgaggtttatagaaagatagatatccaggcttaccaaagtattaagtcaagaatataatatgtgatcagctttcaaagcatttacaagtgctgcaagttagtgaaacagctgtctccgtaaatggaggaaatgtggggaagccttggaatgcccttctggttctggcacattggaaagcacactcagaaggcttcatcaccaagattttgggagagtaaagctaagtatagttgatgtaacattgtagaagcagcataggaacaataagaacaataggtaaagctataattatggcttatatttagaaatgactgcatttgatattttaggatatttttctaggttttttcctttcattttattctcttctagttttgacattttatgatagatttgctctctagaaggaaacgtctttatttaggagggcaaaaattttggtcatagcattcacttttgctattccaatctacaactggaagatacataaaagtgctttgcattgaatttgggataacttcaaaaatcccatggttgttgttagggatagtactaagcatttcagttccaggagaataaaagaaattcctatttgaaatgaattcctcatttggaggaaaaaaagcatgcattctagcacaacaagatgaaattatggaatacaaaagtggctccttcccatgtgcagtccctgtccccccccgccagtcctccacacccaaactgtttctgattggcttttagctttttgttgtttttttttttccttctaacacttgtatttggaggctcttctgtgattttgagaagtatactcttgagtgtttaataaagtttttttccaaaa

SEQ ID NO: 1060 - DNA, 2805 bp, Homo sapiens
acgtcacttccggggcggggcgagcaaggcggaggcggggccggggccggcgggggaggggagcgccaggtccgcgcaggctcgccgggaccgcagccgccgagccgagcgcttgactatatatggtcaaagctgggggcgagccgcgcgcgggaccgcgcttccgggttcggggcgtccgcaaccacagcgcgcagggcaggcgcgagctggcctctgagccccggcctcggaccgcccactccactcccggcacgcccggtgccgccttccggctccagtccccgggctcggcctcggcgaggtgtaattcgcagcgcgggccggccccggaggctctcggcgagcgcggcgcggtaacaagtgggcgaggatgccgtacgagatcaagaaggtgttcgccagcctcccgcaggtggagaggggcgtctccaagatcatcggcggcgaccctaagggcaacaattttctgtacaccaatggaaagtgcgtcatcctaaggaacatcgacaacccagcccttgctgacatctacacagagcacgcccatcaggtggtggtggccaagtatgcgcccagcggattctacattgcctccggagatgtgtctgggaagctgaggatctgggataccacgcagaaggagcacctgttgaagtatgagtaccagcctttcgctgggaagatcaaagacattgcttggactgaagacagtaagaggatcgccgtggtcggggaaggaagggagaagtttggagcagtcttcctctgggatagtggctcttctgtgggcgagattacaggacacaacaaagtcatcaacagcgtggacatcaagcagagccggccataccggctggccacgggaagcgatgataactgcgcggcattctttgagggacccccattcaagttcaagttcacagttggcgaccacagccgctttgtcaactgtgtgcgattctctcctgatgggaacagatttgccacagccagtgctgacggccagatatacatctatgacgggaagactggggagaaggtgtgcgcgctgggcggaagcaaggcccacgacggtgggatttacgcaattagttggagtcccgacagcacccatttgctttctgcttctggggacaaaacttccaagatttgggacgtcagcgtgaactccgtggtcagcacatttcccatgggctccacggttctggaccagcagctgggctgcctatggcagaaggaccacctgctcagtgtctccctgtccgggtacatcaactatctggacagaaacaaccccagcaagcccctgcacgtcatcaagggtcacagtaaatcgatccagtgtctgacggtgcataaaaacggcggcaagtcctacatttactctgggagccacgacggacacattaattactgggattcagagacgggggagaacgactccttcgctgggaaaggccacacgaaccaggtgtccaggatgaccgtggatgagtcggggcagctcatcagctgcagcatggacgacaccgtgcggtacaccagcctcatgctgcgggactacagcggacaaggagttgtgaaactggacgttcagccaaagtgcgtagccgtcggccccgggggatacgccgtggtcgtgtgcattggacagattgtcctgctgaaggatcagaggaagtgcttcagcatcgacaaccccggctacgagcccgaagttgtggcagtgcaccccggcggggacacggtggcaattgggggtgtggacggcaacgtccgcctgtattccatcctgggcaccacgctgaaggatgagggcaagctcctagaggccaagggccccgtgaccgacgtggcctactcccacgacggcgccttcctcgcggtgtgcgacgccagcaaggtggtcacagtgttcagcgttgctgacggctactcggagaacaatgttttttatggacaccatgaaaaataaagcgagcacctaaacaatgtgtggagcataactaaaacccacagcccaaccaaaccttgagaatgcgaaacattccagaggcagtagcctccaaagcacacagagcccctggccccgccgcggctctcactatctgtcaggggaggttgtacaggtgaatgagccggggggctcatgttcctgcctgcagaacatttctgtactagtgagaagagggaatatgcattgcagttcagcaaagccggaattctgtgttgaacagatgtctgtctccctagtgtgtgactcacaccttgtggctgccttcagagcgccacctccagatcagatggggacacacaacccctggatatgtttcattgtcagattttgtgcttgattttaagaatggaattgtgggtatctttcctttttttttaatgtatcttaactgttgcctgtcagtgtttacaaactagtgcgttgacggcaccgtgtccaagtttttagaacccttgttagccagaccgaggtgtcctggtcaccgtttcaccatcatgctttgatgttcccctgtctttccctcttctgctctcaagagcaaaggttaatttaaggacaaagatgaagtcactgtaaactaatctgtcattgtttttaccttccttttctttttcagtgcagaaattaaaagtaagtataaagcaccgtgattgggagtgtttttgcgtgtgtcggaatcactggtaaatgttggctgagaacaatccctccccttgcacttgtgaaaacactttgagcgctttaagagattagcctgagaaataattaaatatcttttctcttca

SEQ ID NO: 1061 - DNA, 3309 bp, Homo sapiens
acgtcacttccggggcggggcgagcaaggcggaggcggggccggggccggcgggggaggggagcgccaggtccgcgcaggctcgccgggaccgcagccgccgagccgagcgcttgactatatatggtcaaagctgggggcgagccgcgcgcgggaccgcgcttccgggttcggggcgtccgcaaccacagcgcgcagggcaggcgcgagctggcctctgagccccggcctcggaccgcccactccactcccggcacgcccggtgccgccttccggctccagtccccgggctcggcctcggcgaggtgtaattcgcagcgcgggccggccccggaggctctcggcgagcgcggcgcggtaacaagtgggcgaggatgccgtacgagatcaagaaggtgttcgccagcctcccgcaggtggagaggggcgtctccaagatcatcggcggcgaccctaagggcaacaattttctgtacaccaatggaaagtgcgtcatcctaaggaacatcgacaacccagcccttgctgacatctacacagagcacgcccatcaggtggtggtggccaagtatgcgcccagcggattctacattgcctccggagatgtgtctgggaagctgaggatctgggataccacgcagaaggagcacctgttgaagtatgagtaccagcctttcgctgggaagatcaaagacattgcttggactgaagacagtaagaggatcgccgtggtcggggaaggaagggagaagtttggagcagtcttcctctgggatagtggctcttctgtgggcgagattacaggacacaacaaagtcatcaacagcgtggacatcaagcagagccggccataccggctggccacgggaagcgatgataactgcgcggcattctttgagggacccccattcaagttcaagttcacagttggcgaccacagccgctttgtcaactgtgtgcgattctctcctgatgggaacagatttgccacagccagtgctgacggccagatatacatctatgacgggaagactggggagaaggtgtgcgcgctgggcggaagcaaggcccacgacggtgggatttacgcaattagttggagtcccgacagcacccatttgctttctgcttctggggacaaaacttccaagatttgggacgtcagcgtgaactccgtggtcagcacatttcccatgggctccacggttctggaccagcagctgggctgcctatggcagaaggaccacctgctcagtgtctccctgtccgggtacatcaactatctggacagaaacaaccccagcaagcccctgcacgtcatcaagggtcacagtaaatcgatccagtgtctgacggtgcataaaaacggcggcaagtcctacatttactctgggagccacgacggacacattaattactgggattcagagacgggggagaacgactccttcgctgggaaaggccacacgaaccaggtgtccaggatgaccgtggatgagtcggggcagctcatcagctgcagcatggacgacaccgtgcggtacaccagcctcatgctgcgggactacagcggacaaggagttgtgaaactggacgttcagccaaagtgcgtagccgtcggccccgggggatacgccgtggtcgtgtgcattggacagattgtcctgctgaaggatcagaggaagtgcttcagcatcgacaaccccggctacgagcccgaagttgtggcagtgcaccccggcggggacacggtggcaattgggggtgtggacggcaacgtccgcctgtattccatcctgggcaccacgctgaaggatgagggcaagctcctagaggccaagggccccgtgaccgacgtggcctactcccacgacggcgccttcctcgcggtgtgcgacgccagcaaggtggtcacagtgttcagcgttgctgacggctactcggagaacaatgttttttatggacaccatgcaaaaatcgtctgcctggcctggtccccagacaatgaacactttgcctccggtggcatggacatgatggtgtatgtttggaccctgagtgacccggaaaccagagtcaagatccaagatgcacaccggctgcaccatgtcagcagcctggcctggctggacgagcacacgctggtcacgacctcccatgatgcctctgtcaaggagtggacaatcacctactgaggagccccacccccgcctctggatggaccgaatcagggactagagtttaactgcagcggaacatgtcatttctctatttctgtgacgcgcccccatgcccccaccccaccacaagaggcaggagggcccagtcatgaccctcgtctctgcagggtgtctgtacacgttcttctgaaagctttagacagtaacagtttgcacatgaaaaataaagcgagcacctaaacaatgtgtggagcataactaaaacccacagcccaaccaaaccttgagaatgcgaaacattccagaggcagtagcctccaaagcacacagagcccctggccccgccgcggctctcactatctgtcaggggaggttgtacaggtgaatgagccggggggctcatgttcctgcctgcagaacatttctgtactagtgagaagagggaatatgcattgcagttcagcaaagccggaattctgtgttgaacagatgtctgtctccctagtgtgtgactcacaccttgtggctgccttcagagcgccacctccagatcagatggggacacacaacccctggatatgtttcattgtcagattttgtgcttgattttaagaatggaattgtgggtatctttcctttttttttaatgtatcttaactgttgcctgtcagtgtttacaaactagtgcgttgacggcaccgtgtccaagtttttagaacccttgttagccagaccgaggtgtcctggtcaccgtttcaccatcatgctttgatgttcccctgtctttccctcttctgctctcaagagcaaaggttaatttaaggacaaagatgaagtcactgtaaactaatctgtcattgtttttaccttccttttctttttcagtgcagaaattaaaagtaagtataaagcaccgtgattgggagtgtttttgcgtgtgtcggaatcactggtaaatgttggctgagaacaatccctccccttgcacttgtgaaaacactttgagcgctttaagagattagcctgagaaataattaaatatcttttctcttcactgtgggtcactgactttgtgtgatgggggtgtgtggggcggctgggtggggaggaacgtttgtgggattttcatg

SEQ ID NO: 1062 - DNA, 3323 bp, Homo sapiens
acgtcacttccggggcggggcgagcaaggcggaggcggggccggggccggcgggggaggggagcgccaggtccgcgcaggctcgccgggaccgcagccgccgagccgagcgcttgactatatatggtcaaagctgggggcgagccgcgcgcgggaccgcgcttccgggttcggggcgtccgcaaccacagcgcgcagggcaggcgcgagctggcctctgagccccggcctcggaccgcccactccactcccggcacgcccggtgccgccttccggctccagtccccgggctcggcctcggcgaggtgtaattcgcagcgcgggccggccccggaggctctcggcgagcgcggcgcggtaacaagtgggcgaggatgccgtacgagatcaagaaggtgttcgccagcctcccgcaggtggagaggggcgtctccaagatcatcggcggcgaccctaagggcaacaattttctgtacaccaatggaaagtgcgtcatcctaaggaacatcgacaacccagcccttgctgacatctacacagagcacgcccatcaggtggtggtggccaagtatgcgcccagcggattctacattgcctccggagatgtgtctgggaagctgaggatctgggataccacgcagaaggagcacctgttgaagtatgagtaccagcctttcgctgggaagatcaaagacattgcttggactgaagacagtaagaggatcgccgtggtcggggaaggaagggagaagtttggagcagtcttcctctgggatagtggctcttctgtgggcgagattacaggacacaacaaagtcatcaacagcgtggacatcaagcagagccggccataccggctggccacgggaagcgatgataactgcgcggcattctttgagggacccccattcaagttcaagttcacagttggcgaccacagccgctttgtcaactgtgtgcgattctctcctgatgggaacagatttgccacagccagtgctgacggccagatatacatctatgacgggaagactggggagaaggtgtgcgcgctgggcggaagcaaggcccacgacggtgggatttacgcaattagttggagtcccgacagcacccatttgctttctgcttctggggacaaaacttccaagatttgggacgtcagcgtgaactccgtggtcagcacatttcccatgggctccacggttctggaccagcagctgggctgcctatggcagaaggaccacctgctcagtgtctccctgtccgggtacatcaactatctggacagaaacaaccccagcaagcccctgcacgtcatcaagggtcacagtaaatcgatccagtgtctgacggtgcataaaaacggcggcaagtcctacatttactctgggagccacgacggacacattaattactgggattcagagacgggggagaacgactccttcgctgggaaaggccacacgaaccaggtgtccaggatgaccgtggatgagtcggggcagctcatcagctgcagcatggacgacaccgtgcggtacaccagcctcatgctgcgggactacagcggacaaggagttgtgaaactggacgttcagccaaagtgcgtagccgtcggccccgggggatacgccgtggtcgtgtgcattggacagattgtcctgctgaaggatcagaggaagtgcttcagcatcgacaaccccggctacgagcccgaagttgtggcagtgcaccccggcggggacacggtggcaattgggggtgtggacggcaacgtccgcctgtattccatcctgggcaccacgctgaaggatgagggcaagctcctagaggccaagggccccgtgaccgacgtggcctactcccacgacggcgccttcctcgcggtgtgcgacgccagcaaggtggtcacagtgttcagcgttgctgacggctactcggtgagagaacaatgttttttatggacaccatgcaaaaatcgtctgcctggcctggtccccagacaatgaacactttgcctccggtggcatggacatgatggtgtatgtttggaccctgagtgacccggaaaccagagtcaagatccaaggtgacttccgatgcacaccggctgcaccatgtcagcagcctggcctggctggacgagcacacgctggtcacgacctcccatgatgcctctgtcaaggagtggacaatcacctactgaggagccccacccccgcctctggatggaccgaatcagggactagagtttaactgcagcggaacatgtcatttctctatttctgtgacgcgcccccatgcccccaccccaccacaagaggcaggagggcccagtcatgaccctcgtctctgcagggtgtctgtacacgttcttctgaaagctttagacagtaacagtttgcacatgaaaaataaagcgagcacctaaacaatgtgtggagcataactaaaacccacagcccaaccaaaccttgagaatgcgaaacattccagaggcagtagcctccaaagcacacagagcccctggccccgccgcggctctcactatctgtcaggggaggttgtacaggtgaatgagccggggggctcatgttcctgcctgcagaacatttctgtactagtgagaagagggaatatgcattgcagttcagcaaagccggaattctgtgttgaacagatgtctgtctccctagtgtgtgactcacaccttgtggctgccttcagagcgccacctccagatcagatggggacacacaacccctggatatgtttcattgtcagattttgtgcttgattttaagaatggaattgtgggtatctttcctttttttttaatgtatcttaactgttgcctgtcagtgtttacaaactagtgcgttgacggcaccgtgtccaagtttttagaacccttgttagccagaccgaggtgtcctggtcaccgtttcaccatcatgctttgatgttcccctgtctttccctcttctgctctcaagagcaaaggttaatttaaggacaaagatgaagtcactgtaaactaatctgtcattgtttttaccttccttttctttttcagtgcagaaattaaaagtaagtataaagcaccgtgattgggagtgtttttgcgtgtgtcggaatcactggtaaatgttggctgagaacaatccctccccttgcacttgtgaaaacactttgagcgctttaagagattagcctgagaaataattaaatatcttttctcttcactgtgggtcactgactttgtgtgatgggggtgtgtggggcggctgggtggggaggaacgtttgtgggattttcatg

SEQ ID NO: 1063 - DNA, 3348 bp, Homo sapiens
acgtcacttccggggcggggcgagcaaggcggaggcggggccggggccggcgggggaggggagcgccaggtccgcgcaggctcgccgggaccgcagccgccgagccgagcgcttgactatatatggtcaaagctgggggcgagccgcgcgcgggaccgcgcttccgggttcggggcgtccgcaaccacagcgcgcagggcaggcgcgagctggcctctgagccccggcctcggaccgcccactccactcccggcacgcccggtgccgccttccggctccagtccccgggctcggcctcggcgaggtgtaattcgcagcgcgggccggccccggaggctctcggcgagcgcggcgcggtaacaagtgggcgaggatgccgtacgagatcaagaaggtgttcgccagcctcccgcaggtggagaggggcgtctccaagatcatcggcggcgaccctaagggcaacaattttctgtacaccaatggaaagtgcgtcatcctaaggaacatcgacaacccagcccttgctgacatctacacagagcacgcccatcaggtggtggtggccaagtatgcgcccagcggattctacattgcctccggagatgtgtctgggaagctgaggatctgggataccacgcagaaggagcacctgttgaagtatgagtaccagcctttcgctgggaagatcaaagacattgcttggactgaagacagtaagaggatcgccgtggtcggggaaggaagggagaagtttggagcagtcttcctctgggatagtggctcttctgtgggcgagattacaggacacaacaaagtcatcaacagcgtggacatcaagcagagccggccataccggctggccacgggaagcgatgataactgcgcggcattctttgagggacccccattcaagttcaagttcacagttggcgaccacagccgctttgtcaactgtgtgcgattctctcctgatgggaacagatttgccacagccagtgctgacggccagatatacatctatgacgggaagactggggagaaggtgtgcgcgctgggcggaagcaaggcccacgacggtgggatttacgcaattagttggagtcccgacagcacccatttgctttctgcttctggggacaaaacttccaagatttgggacgtcagcgtgaactccgtggtcagcacatttcccatgggctccacggttctggaccagcagctgggctgcctatggcagaaggaccacctgctcagtgtctccctgtccgggtacatcaactatctggacagaaacaaccccagcaagcccctgcacgtcatcaagggtcacagtaaatcgatccagtgtctgacggtgcataaaaacggcggcaagtcctacatttactctgggagccacgacggacacattaatatcctgggagccgggcttttccttaaccccaccctacattactgggattcagagacgggggagaacgactccttcgctgggaaaggccacacgaaccaggtgtccaggatgaccgtggatgagtcggggcagctcatcagctgcagcatggacgacaccgtgcggtacaccagcctcatgctgcgggactacagcggacaaggagttgtgaaactggacgttcagccaaagtgcgtagccgtcggccccgggggatacgccgtggtcgtgtgcattggacagattgtcctgctgaaggatcagaggaagtgcttcagcatcgacaaccccggctacgagcccgaagttgtggcagtgcaccccggcggggacacggtggcaattgggggtgtggacggcaacgtccgcctgtattccatcctgggcaccacgctgaaggatgagggcaagctcctagaggccaagggccccgtgaccgacgtggcctactcccacgacggcgccttcctcgcggtgtgcgacgccagcaaggtggtcacagtgttcagcgttgctgacggctactcggagaacaatgttttttatggacaccatgcaaaaatcgtctgcctggcctggtccccagacaatgaacactttgcctccggtggcatggacatgatggtgtatgtttggaccctgagtgacccggaaaccagagtcaagatccaagatgcacaccggctgcaccatgtcagcagcctggcctggctggacgagcacacgctggtcacgacctcccatgatgcctctgtcaaggagtggacaatcacctactgaggagccccacccccgcctctggatggaccgaatcagggactagagtttaactgcagcggaacatgtcatttctctatttctgtgacgcgcccccatgcccccaccccaccacaagaggcaggagggcccagtcatgaccctcgtctctgcagggtgtctgtacacgttcttctgaaagctttagacagtaacagtttgcacatgaaaaataaagcgagcacctaaacaatgtgtggagcataactaaaacccacagcccaaccaaaccttgagaatgcgaaacattccagaggcagtagcctccaaagcacacagagcccctggccccgccgcggctctcactatctgtcaggggaggttgtacaggtgaatgagccggggggctcatgttcctgcctgcagaacatttctgtactagtgagaagagggaatatgcattgcagttcagcaaagccggaattctgtgttgaacagatgtctgtctccctagtgtgtgactcacaccttgtggctgccttcagagcgccacctccagatcagatggggacacacaacccctggatatgtttcattgtcagattttgtgcttgattttaagaatggaattgtgggtatctttcctttttttttaatgtatcttaactgttgcctgtcagtgtttacaaactagtgcgttgacggcaccgtgtccaagtttttagaacccttgttagccagaccgaggtgtcctggtcaccgtttcaccatcatgctttgatgttcccctgtctttccctcttctgctctcaagagcaaaggttaatttaaggacaaagatgaagtcactgtaaactaatctgtcattgtttttaccttccttttctttttcagtgcagaaattaaaagtaagtataaagcaccgtgattgggagtgtttttgcgtgtgtcggaatcactggtaaatgttggctgagaacaatccctccccttgcacttgtgaaaacactttgagcgctttaagagattagcctgagaaataattaaatatcttttctcttcactgtgggtcactgactttgtgtgatgggggtgtgtggggcggctgggtggggaggaacgtttgtgggattttcatg

SEQ ID NO: 1064 - DNA, 2271 bp, Homo sapiens
ggcacgagcgcaaccacagcgcgcagggcaggcgcgagctggcctctgagccccggcctcggaccgcccactccactcccggcacgcccggtgccgccttccggctccagtccccgggctcggcctcggcgaggtgtaattcgcagcgcgggccggccccggaggctctcggcgagcgcggcgcggtaacaagtgggcgaggatgccgtacgagatcaagaaggtgttcgccagcctcccgcaggtggagaggggcgtctccaagatcatcggcggcgaccctaagggcaacaattttctgtacaccaatggaaagtgcgtcatcctaaggaacatcgacaacccagcccttgctgacatctacacagagcacgcccatcaggtggtggtggccaagtatgcgcccagcggattctacattgcctccggagatgtgtctgggaagctgaggatctgggataccacgcagaaggagcacctgttgaagtatgagtaccagcctttcgctgggaagatcaaagacattgcttggactgaagacagtaagaggatcgccgtggtcggggaaggaagggagaagtttggagcagtcttcctctgggatagtggctcttctgtgggcgagattacaggacacaacaaagtcatcaacagcgtggacatcaagcagagccggccataccggctggccacgggaagcgatgataactgcgcggcattctttgagggacccccattcaagttcaagttcacaattggcgaccacagccgctttgtcaactgtgtgcgattctctcctgatgggaacagatttgccacagccagtgctgacggccagatatacatctatgacgggaagactggggagaaggtgtgcgcgctgggcggaagcaaggcccacgacggtgggatttacgcaattagttggagtcccgacagcacccatttgctttctgcttctggggacaaaacttccaagatttgggacgtcagcgtgaactccgtggtcagcacatttcccatgggctccacggttctggaccagcagctgggctgcctatggcagaaggaccacctgctcagtgtctccctgtccgggtacatcaactatctggacagaaacaaccccagcaagcccctgcacgtcatcaagggtcacagtaaatcgatccagtgtctgacggtgcataaaaacggcggcaagtcctacatttactctgggagccacgacggacacattaattactgggattcagagacgggggagaacgactccttcgctgggaaaggccacacgaaccaggtgtccaggatgaccgtggatgagtcggggcagctcatcagctgcagcatggacgacaccgtgcggtacaccagcctcatgctgcgggactacagcggacaaggagttgtgaaactggacgttcagccaaagtgcgtagccgtcggccccgggggatacgccgtggtcgtgtgcattggacagattgtcctgctgaaggatcagaggaagtgcttcagcatcgacaaccccggctacgagcccgaagttgtggcagtgcaccccggcggggacacggtggcaattgggggtgtggacggcaacgtccgcctgtattccatcctgggcaccacgctgaaggatgagggcaagctcctagaggccaagggccccgtgaccgacgtggcctactcccacgacggcgccttcctcgcggtgtgcgacgccagcaaggtggtcacagtgttcagcgttgctgacggctactcggagaacaatgttttttatggacaccatgcaaaaatcgtctgcctggcctggtccccagacaatgaacactttgcctccggtggcatggacatgatggtgtatgtttggaccctgagtgacccggaaaccagagtcaagatccaagatgcacaccggctgcaccatgtcagcagcctggcctggctggacgagcacacgctggtcacgacctcccatgatgcctctgtcaaggagtggacaatcacctactgaggagccccacccccgcctctggatggaccgaatcagggactagagtttaactgcagcggaacatgtcatttctttatttctgtgacgcgcccccatgcccccaccccaccacaagaggcaggagggcccagtcatgaccctcgtctctgcagggtgtctgtacacgttcttctgaaagctttagacagtaacagtttgcacatgaaaaataaagcgagcacctaaacaaaaaaaaaaaaaaaaaaaaa

SEQ ID NO: 1065 - DNA, 1727 bp, Homo sapiens
aatggcaggctcccagggtgatttgagagttgccaggagaggaaggccatttggcaagaatcctgacagacaaaagctggaggagggtagagcaagatggcagaatagaaagcgccaccgatcatactccgcccccacaaggacaccaagttaactacctacacagaagaaataccttcataagaatcaaaaatcaggttctacctcccagatgacatttctagacacaccctgggccagaagagaacccacttccttgaaggaaaggatccagtcctggcagcattcatcgcctgctaactgaagatcccttgggccttgaataccaacagcaatacccaggtactacatcgaagtctttgggtgaacctctgagacttcctggctttaggtagcaacgaagcacggaagaatcttgaccctttgaggaacccgtaactgacgcaagtgccataaatgctactttgattgattctccgccccctccattcttctcttcctgcaattgctctatcacttcttccctctcaagtcccgccctttcagctacctccaactgctgaggaaccggttgcctaaaaggagccggcaaaagcgcctacgtggagtccagaggagcggaagtagtcagatttgactgagagccgtaaagcgcggctggctctcgttttccggataacgactacagctccgactgtcagtgccggccttcctcgtgtgaggggatctgccggacccctgcaaattcaatttctttcccattccgggcccttccctatcgtcgcccccttcaccttggatcatgttcaagaaatttgatgaaaaagaaaatgtgtccaactgcatccagttgaaaacttcagttattaagggtattaagaatcaattgatagagcaatttccaggtattgaaccatggcttaatcaaatcatgcctaagaaagatcctgtcaaaatagtccgatgccatgaacatatagaaatccttacagtaaatggagaattactcttttttagacaaagagaagggcctttttatccaaccctaagattacttcacaaatatccttttatcctgccacaccagcaggttgataaaggagccatcaaatttgtactcagtggagcaaatatcatgtgtccaggcttaacttctcctggagctaagctttaccctgctgcagtagataccattgttgctatcatggcagaaggaaaacagcatgctctatgtgttggagtcatgaagatgtctgcagaagacattgagaaagtcaacaaaggaattggcattgaaaatatccattatttaaatgatgggctgtggcatatgaagacatataaatgagcctcagaaggaatgcacttgggctaaatatggatattgtgctgtatctgtgtttgtgtctgtgtgtgacagcatgaagataatgcctgtggttatgctgaataaattcaccagatgctaaaattctgttagcttcagaaattattttaagttttcttaaactcaagttaaaattgggtagcaaacttggacattaaaaggtatctggtaagtaagcaaactcatacaactaatgtcctttcttaggctaatgatataagagtgaagagcaggacttggtcaatggattgccattttatggtagacctctagagaaactgtctagttaaatggggctagaaactagactaggaattttattctattactccaggggacc

SEQ ID NO: 1066 - DNA, 1355 bp, Homo sapiens
cagaatcttgctgtgtcgcccaggctggactgcagtggtgtaatcttggctcactgcaacctctgcctcccgggttcaagcgattcttgtgcgtcagccttcttgagtacctgggactacaggctcccagggtgatttgagagttgccaggagaggaaggccatttggcaagaatcctgacagacaaaagctggaggagggtagagcaagatggcagaatagaaagcgccaccgatcatactccgcccccacaaggacaccaagttaactacctacacagaagaaataccttcataagaatcaaaaatcagacacaccctgggccagaagagaacccacttccttgaaggaaaggatccagtcctggcagcattcatcgcctgctaactgaagatcccttgggccttgaataccaacagcaatacccagatttgatgaaaaagaaaatgtgtccaactgcatccagttgaaaacttcagttattaagggtattaagaatcaattgatagagcaatttccaggtattgaaccatggcttaatcaaatcatgcctaagaaagatcctgtcaaaatagtccgatgccatgaacatatagaaatccttacagtaaatggagaattactcttttttagacaaagagaagggcctttttatccaaccctaagattacttcacaaatatccttttatcctgccacaccagcaggttgataaaggagccatcaaatttgtactcagtggagcaaatatcatgtgtccaggcttaacttctcctggagctaagctttaccctgctgcagtagataccattgttgctatcatggcagaaggaaaacagcatgctctatgtgttggagtcatgaagatgtctgcagaagacattgagaaagtcaacaaaggaattggcattgaaaatatccattatttaaatgatgggctgtggcatatgaagacatataaatgagcctcagaaggaatgcacttgggctaaatatggatattgtgctgtatctgtgtttgtgtctgtgtgtgacagcatgaagataatgcctgtggttatgctgaataaattcaccagatgctaaaattctgttagcttcagaaattattttaagttttcttaaactcaagttaaaattgggtagcaaacttggacattaaaagatataagagtgaagagcaggacttggtcaatggattgccattttatggtagacctctagagaaactgtctagttaaatggggctagaaactagactaggaattttattctattactccaggggacccagcagtgctcattctcgtgtgtgtgtgtgtgtgtgtgtgtgtatgtgtgtgtgtgtgtgtgtgt

SEQ ID NO: 1067 - DNA, 1336 bp, Homo sapiens
gtagcaacgaagcacggaagaatcttgaccctttgaggaacccgtaactgacgcaagtgccataaatgctactttgattgattctccgccccctccattcttctcttcctgcaattgctctatcacttcttccctctcaagtcccgccctttcagctacctccaactgctgaggaaccggttgcctaaaaggagccggcaaaagcgcctacgtggagtccagaggagcggaagtagtcagatttgactgagagccgtaaagcgcggctggctctcgttttccggataacgactacagctccgactgtcagtgccggccttcctcgtgtgaggggatctgccggacccctgcaaattcaatttctttcccattccgggcccttccctatcgtcgcccccttcaccttggatcatgttcaagaaatttgatgaaaaagaaaatgtgtccaactgcatccagttgaaaacttcagttattaagggtattaagaatcaattgatagagcaatttccaggtattgaaccatggcttaatcaaatcatgcctaagaaagatcctgtcaaaatagtccgatgccatgaacatatagaaatccttacagtaaatggagaattactcttttttagacaaagagaagggcctttttatccaaccctaagattacttcacaaatatccttttatcctgccacaccagcaggttgataaaggagccatcaaatttgtactcagtggagcaaatatcatgtgtccaggcttaacttctcctggagctaagctttaccctgctgcagtagataccattgttgctatcatggcagaaggaaaacagcatgctctatgtgttggagtcatgaagatgtctgcagaagacattgagaaagtcaacaaaggaattggcattgaaaatatccattatttaaatgatgggctgtggcatatgaagacatataaatgagcctcagaaggaatgcacttgggctaaatatggatattgtgctgtatctgtgtttgtgtctgtgtgtgacagcatgaagataatgcctgtggttatgctgaataaattcaccagatgctaaaattctgttagcttcagaaattattttaagttttcttaaactcaagttaaaattgggtagcaaacttggacattaaaaggtatctggtaagtaagcaaactcatacaactaatgtcctttcttaggctaatgatataagagtgaagagcaggacttggtcaatggattgccattttatggtagacctctagagaaactgtctagttaaatggggctagaaactagactaggaattttattctattactccaggggacc

SEQ ID NO: 1068 - DNA, 943 bp, Homo sapiens
gctacctccaactgctgaggaaccggttgcctaaaaggagccggcaaaagcgcctacgtggagtccagaggagcggaagtagtcagatttgactgagagccgtaaagcgcggctggctctcgttttccggataacgactacagctccgactgtcagtgccggccttcctcgtgtgaggggatctgccggacccctgcaaattcaatttctttcccattccgggcccttccctatcgtcgcccccttcaccttggatcatgttcaagaaatttgatgaaaaagaaaatgtgtccaactgcatccagttgaaaacttcagttattaagggtattaagaatcaattgatagagcaatttccaggtattgaaccatggcttaatcaaatcatgcctaagaaagatcctgtcaaaatagtccgatgccatgaacatatagaaatccttacagtaaatggagaattactcttttttagacaaagagaagggcctttttatccaaccctaagattacttcacaaatatccttttatcctgccacaccagcaggttgataaaggagccatcaaatttgtactcagtggagcaaatatcatgtgtccaggcttaacttctcctggagctaagctttaccctgctgcagtagataccattgttgctatcatggcagaaggaaaacagcatgctctatgtgttggagtcatgaagatgtctgcagaagacattgagaaagtcaacaaaggaattggcattgaaaatatccattatttaaatgatgggctgtggcatatgaagacatataaatgagcctcagaaggaatgcacttgggctaaatatggatattgtgctgtatctgtgtttgtgtctgtgtgtgacagcatgaagataatgcctgtggttatgctgaataaattcaccagatgctaaaaaaaaaaaaaaaaaaaaa

SEQ ID NO: 1069 - DNA, 2976 bp, Homo sapiens
ctcagggcagagggaggaaggacagcagaccagacagtcacagcagccttgacaaaacgttcctggaactcaagctcttctccacagaggaggacagagcagacagcagagaccatggagtctccctcggcccctccccacagatggtgcatcccctggcagaggctcctgctcacagcctcacttctaaccttctggaacccgcccaccactgccaagctcactattgaatccacgccgttcaatgtcgcagaggggaaggaggtgcttctacttgtccacaatctgccccagcatctttttggctacagctggtacaaaggtgaaagagtggatggcaaccgtcaaattataggatatgtaataggaactcaacaagctaccccagggcccgcatacagtggtcgagagataatataccccaatgcatccctgctgatccagaacatcatccagaatgacacaggattctacaccctacacgtcataaagtcagatcttgtgaatgaagaagcaactggccagttccgggtatacccggagctgcccaagccctccatctccagcaacaactccaaacccgtggaggacaaggatgctgtggccttcacctgtgaacctgagactcaggacgcaacctacctgtggtgggtaaacaatcagagcctcccggtcagtcccaggctgcagctgtccaatggcaacaggaccctcactctattcaatgtcacaagaaatgacacagcaagctacaaatgtgaaacccagaacccagtgagtgccaggcgcagtgattcagtcatcctgaatgtcctctatggcccggatgcccccaccatttcccctctaaacacatcttacagatcaggggaaaatctgaacctctcctgccacgcagcctctaacccacctgcacagtactcttggtttgtcaatgggactttccagcaatccacccaagagctctttatccccaacatcactgtgaataatagtggatcctatacgtgccaagcccataactcagacactggcctcaataggaccacagtcacgacgatcacagtctatgcagagccacccaaacccttcatcaccagcaacaactccaaccccgtggaggatgaggatgctgtagccttaacctgtgaacctgagattcagaacacaacctacctgtggtgggtaaataatcagagcctcccggtcagtcccaggctgcagctgtccaatgacaacaggaccctcactctactcagtgtcacaaggaatgatgtaggaccctatgagtgtggaatccagaacgaattaagtgttgaccacagcgacccagtcatcctgaatgtcctctatggcccagacgaccccaccatttccccctcatacacctattaccgtccaggggtgaacctcagcctctcctgccatgcagcctctaacccacctgcacagtattcttggctgattgatgggaacatccagcaacacacacaagagctctttatctccaacatcactgagaagaacagcggactctatacctgccaggccaataactcagccagtggccacagcaggactacagtcaagacaatcacagtctctgcggagctgcccaagccctccatctccagcaacaactccaaacccgtggaggacaaggatgctgtggccttcacctgtgaacctgaggctcagaacacaacctacctgtggtgggtaaatggtcagagcctcccagtcagtcccaggctgcagctgtccaatggcaacaggaccctcactctattcaatgtcacaagaaatgacgcaagagcctatgtatgtggaatccagaactcagtgagtgcaaaccgcagtgacccagtcaccctggatgtcctctatgggccggacacccccatcatttcccccccagactcgtcttacctttcgggagcgaacctcaacctctcctgccactcggcctctaacccatccccgcagtattcttggcgtatcaatgggataccgcagcaacacacacaagttctctttatcgccaaaatcacgccaaataataacgggacctatgcctgttttgtctctaacttggctactggccgcaataattccatagtcaagagcatcacagtctctgcatctggaacttctcctggtctctcagctggggccactgtcggcatcatgattggagtgctggttggggttgctctgatatagcagccctggtgtagtttcttcatttcaggaagactgacagttgttttgcttcttccttaaagcatttgcaacagctacagtctaaaattgcttctttaccaaggatatttacagaaaagactctgaccagagatcgagaccatcctagccaacatcgtgaaaccccatctctactaaaaatacaaaaatgagctgggcttggtggcgcgcacctgtagtcccagttactcgggaggctgaggcaggagaatcgcttgaacccgggaggtggagattgcagtgagcccagatcgcaccactgcactccagtctggcaacagagcaagactccatctcaaaaagaaaagaaaagaagactctgacctgtactcttgaatacaagtttctgataccactgcactgtctgagaatttccaaaactttaatgaactaactgacagcttcatgaaactgtccaccaagatcaagcagagaaaataattaatttcatgggactaaatgaactaatgaggattttgctgattctttaaatgtcttgtttcccagatttcaggaaactttttttcttttaagctatccacagcttacagcaatttgataaaatatacttttgtgaacaaaaattgagacatttacattttctccctatgtggtcgctccagacttgggaaactattcatgaatatttatattgtatggtaatatagttattgcacaagttcaataaaaatctgctctttgtatgacagaata

SEQ ID NO: 1070 - DNA, 2974 bp, Homo sapiens
ctcagggcagagggaggaaggacagcagaccagacagtcacagcagccttgacaaaacgttcctggaactcaagctcttctccacagaggaggacagagcagacagcagagaccatggagtctccctcggcccctccccacagatggtgcatcccctggcagaggctcctgctcacagcctcacttctaaccttctggaacccgcccaccactgccaagctcactattgaatccacgccgttcaatgtcgcagaggggaaggaggtgcttctacttgtccacaatctgccccagcatctttttggctacagctggtacaaaggtgaaagagtggatggcaaccgtcaaattataggatatgtaataggaactcaacaagctaccccagggcccgcatacagtggtcgagagataatataccccaatgcatccctgctgatccagaacatcatccagaatgacacaggattctacaccctacacgtcataaagtcagatcttgtgaatgaagaagcaactggccagttccgggtatacccggagctgcccaagccctccatctccagcaacaactccaaacccgtggaggacaaggatgctgtggccttcacctgtgaacctgagactcaggacgcaacctacctgtggtgggtaaacaatcagagcctcccggtcagtcccaggctgcagctgtccaatggcaacaggaccctcactctattcaatgtcacaagaaatgacacagcaagctacaaatgtgaaacccagaacccagtgagtgccaggcgcagtgattcagtcatcctgaatgtcctctatggcccggatgcccccaccatttcccctctaaacacatcttacagatcaggggaaaatctgaacctctcctgccacgcagcctctaacccacctgcacagtactcttggtttgtcaatgggactttccagcaatccacccaagagctctttatccccaacatcactgtgaataatagtggatcctatacgtgccaagcccataactcagacactggcctcaataggaccacagtcacgacgatcacagtctatgcagagccacccaaacccttcatcaccagcaacaactccaaccccgtggaggatgaggatgctgtagccttaacctgtgaacctgagattcagaacacaacctacctgtggtgggtaaataatcagagcctcccggtcagtcccaggctgcagctgtccaatgacaacaggaccctcactctactcagtgtcacaaggaatgatgtaggaccctatgagtgtggaatccagaacgaattaagtgttgaccacagcgacccagtcatcctgaatgtcctctatggcccagacgaccccaccatttccccctcatacacctattaccgtccaggggtgaacctcagcctctcctgccatgcagcctctaacccacctgcacagtattcttggctgattgatgggaacatccagcaacacacacaagagctctttatctccaacatcactgagaagaacagcggactctatacctgccaggccaataactcagccagtggccacagcaggactacagtcaagacaatcacagtctctgcggagctgcccaagccctccatctccagcaacaactccaaacccgtggaggacaaggatgctgtggccttcacctgtgaacctgaggctcagaacacaacctacctgtggtgggtaaatggtcagagcctcccagtcagtcccaggctgcagctgtccaatggcaacaggaccctcactctattcaatgtcacaagaaatgacgcaagagcctatgtatgtggaatccagaactcagtgagtgcaaaccgcagtgacccagtcaccctggatgtcctctatgggccggacacccccatcatttcccccccagactcgtcttacctttcgggagcgaacctcaacctctcctgccactcggcctctaacccatccccgcagtattcttggcgtatcaatgggataccgcagcaacacacacaagttctctttatcgccaaaatcacgccaaataataacgggacctatgcctgttttgtctctaacttggctactggccgcaataattccatagtcaagagcatcacagtctctgcatctggaacttctcctggtctctcagctggggccactgtcggcatcatgattggagtgctggttggggttgctctgatatagcagccctggtgtagtttcttcatttcaggaagactgacagttgttttgcttcttccttaaagcatttgcaacagctacagtctaaaattgcttctttaccaaggatatttacagaaaagactctgaccagagatcgagaccatcctagccaacatcgtgaaaccccatctctactaaaaatacaaaaatgagctgggcttggtggcgcgcacctgtagtcccagttactcgggaggctgaggcaggagaatcgcttgaacccgggaggtggagattgcagtgagcccagatcgcaccactgcactccagtctggcaacagagcaagactccatctcaaaaagaaaagaaaagaagactctgacctgtactcttgaatacaagtttctgataccactgcactgtctgagaatttccaaaactttaatgaactaactgacagcttcatgaaactgtccaccaagatcaagcagagaaaataattaatttcatgggactaaatgaactaatgaggattgctgattctttaaatgtcttgtttcccagatttcaggaaactttttttcttttaagctatccactcttacagcaatttgataaaatatacttttgtgaacaaaaattgagacatttacattttctccctatgtggtcgctccagacttgggaaactattcatgaatatttatattgtatggtaatatagttattgcacaagttcaataaaaatctgctctttgtataacagaaaaa

SEQ ID NO: 1071 - DNA, 2799 bp, Homo sapiens
ctcagggcagagggaggaaggacagcagaccagacagtcacagcagccttgacaaaacgttcctggaactcaagctcttctccacagaggaggacagagcagacagcagagaccatggagtctccctcggcccctccccacagatggtgcatcccctggcagaggctcctgctcacagcctcacttctaaccttctggaacccgcccaccactgccaagctcactattgaatccacgccgttcaatgtcgcagaggggaaggaggtgcttctacttgtccacaatctgccccagcatctttttggctacagctggtacaaaggtgaaagagtggatggcaaccgtcaaattataggatatgtaataggaactcaacaagctaccccagggcccgcatacagtggtcgagagataatataccccaatgcatccctgctgatccagaacatcatccagaatgacacaggattctacaccctacacgtcataaagtcagatcttgtgaatgaagaagcaactggccagttccgggtatacccggagctgcccaagccctccatctccagcaacaactccaaacccgtggaggacaaggatgctgtggccttcacctgtgaacctgagactcaggacgcaacctacctgtggtgggtaaacaatcagagcctcccggtcagtcccaggctgcagctgtccaatggcaacaggaccctcactctattcaatgtcacaagaaatgacacagcaagctacaaatgtgaaacccagaacccagtgagtgccaggcgcagtgattcagtcatcctgaatgtcctctatggcccggatgcccccaccatttcccctctaaacacatcttacagatcaggggaaaatctgaacctctcctgccacgcagcctctaacccacctgcacagtactcttggtttgtcaatgggactttccagcaatccacccaagagctctttatccccaacatcactgtgaataatagtggatcctatacgtgccaagcccataactcagacactggcctcaataggaccacagtcacgacgatcacagtctatgcagagccacccaaacccttcatcaccagcaacaactccaaccccgtggaggatgaggatgctgtagccttaacctgtgaacctgagattcagaacacaacctacctgtggtgggtaaataatcagagcctcccggtcagtcccaggctgcagctgtccaatgacaacaggaccctcactctactcagtgtcacaaggaatgatgtaggaccctatgagtgtggaatccagaacgaattaagtgttgaccacagcgacccagtcatcctgaatgtcctctatggcccagacgaccccaccatttccccctcatacacctattaccgtccaggggtgaacctcagcctctcctgccatgcagcctctaacccacctgcacagtattcttggctgattgatgggaacatccagcaacacacacaagagctctttatctccaacatcactgagaagaacagcggactctatacctgccaggccaataactcagccagtggccacagcaggactacagtcaagacaatcacagtctctgcggagctgcccaagccctccatctccagcaacaactccaaacccgtggaggacaaggatgctgtggccttcacctgtgaacctgaggctcagaacacaacctacctgtggtgggtaaatggtcagagcctcccagtcagtcccaggctgcagctgtccaatggcaacaggaccctcactctattcaatgtcacaagaaatgacgcaagagcctatgtatgtggaatccagaactcagtgagtgcaaaccgcagtgacccagtcaccctggatgtcctctatgggccggacacccccatcatttcccccccagactcgtcttacctttcgggagcgaacctcaacctctcctgccactcggcctctaacccatccccgcagtattcttggcgtatcaatgggataccgcagcaacacacacaagttctctttatcgccaaaatcacgccaaataataacgggacctatgcctgttttgtctctaacttggctactggccgcaataattccatagtcaagagcatcacagtctctgcatctggaacttctcctggtctctcagctggggccactgtcggcatcatgattggagtgctggttggggttgctctgatatagcagccctggtgtagtttcttcatttcaggaagactgacagttgttttgcttcttccttaaagcatttgcaacagctacagtctaaaattgcttctttaccaaggatatttacagaaaagactctgaccagagatcgagaccatcctagccaacatcgtgaaaccccatctctactaaaaatacaaaaatgagctgggcttggtggcgcgcacctgtagtcccagttactcgggaggctgaggcaggagaatcgcttgaacccgggaggtggagattgcagtgagcccagatcgcaccactgcactccagtctggcaacagagcaagactccatctcaaaaagaaaagaaaagaagactctgacctgtactcttgaatacaagtttctgataccactgcactgtctgagaatttccaaaactttaatgaactaactgacagcttcatgaaactgtccaccaagatcaagcagagaaaataattaatttcatgggactaaatgaactaatgaggattttgtggattctttgttttgtttcccagatttcaggaaacattttttctttcaagctatcta

SEQ ID NO: 1072 - DNA, 4166 bp, Homo sapiens
gcagttgtgaaaaacttcaggacaaaaatgtttcatttaaggacttgtgctgctaagttgaggccattgacggcttcccagactgttaagacattttcacaaaacagaccagcagcagctaggacatttcaacagattcggtgctattctgcacctgttgctgctgagccctttctcagtgggactagttcgaactatgtggaggagatgtactgtgcttggctggaaaaccccaaaagtgtacataagtcatgggacattttttttcgcaacacgaatgccggagccccaccgggcactgcctaccagagtccccttcccctgagccgaggctccctggctgctgtggcccatgcacagtccctggtagaagcacagcccaacgtggacaagctcgtggaggaccacctggcagtgcagtcgctcatcagggcatatcagatacgagggcaccatgtagcacagctggaccccctggggattttggatgctgatctggactcctccgtgcccgctgacattatctcatccacagacaaacttgggttctatggcctggatgagtctgacctcgacaaggtcttccacttgcccaccaccactttcatcgggggacaggaatcagcacttcctctgcgggagatcatccgtcggctggagatggcctactgccagcatattggggtggagttcatgttcatcaatgacctggagcagtgccagtggatccggcagaagtttgagacccctgggatcatgcagttcacaaatgaggagaaacggaccctgctggccaggcttgtgcggtccaccaggtttgaggagttcctacagcggaagtggtcctctgagaagcgctttggtctagaaggctgcgaggtactgatccctgccctcaagaccatcattgacaagtctagtgagaatggcgtggactacgtgatcatgggcatgccacacagagggcggctgaacgtgcttgcaaatgtcatcaggaaggagctggaacagatcttctgtcaattcgattcaaagctggaggcagctgatgagggctccggagatgtgaagtaccacctgggcatgtatcaccgcaggatcaatcgtgtcaccgacaggaacattaccttgtccttggtggccaacccttcccaccttgaggccgctgaccccgtggtgatgggcaagaccaaagccgaacagttttactgtggcgacactgaagggaaaaaggtcatgtccatcctgttgcatggggatgctgcatttgctggccagggcattgtgtacgagaccttccacctcagcgacctgccatcctacacaactcatggcaccgtgcacgtggtcgtcaacaaccagatcggcttcaccaccgaccctcggatggcccgctcctccccctaccccactgacgtggcccgagtggtgaatgcccccattttccacgtgaactcagatgaccccgaggctgtcatgtacgtgtgcaaagtggcggccgagtggaggagcaccttccacaaggacgtggttgtcgatttggtgtgttaccggcgcaacggccacaacgagatggatgagcccatgttcacgcagccgctcatgtacaagcagatccgcaagcagaagcctgtgttacagaagtacgctgagctgctggtgtcgcagggtgtggtcaaccagcctgagtatgaggaggaaatttccaagtatgataagatctgtgaggaagcttttgccagatctaaagatgagaagatcttgcacattaagcactggctggactctccctggcctggcttcttcaccctggacgggcagcccaggagcatgtcctgcccctccacgggtctgacggaggatattctgacacacatcgggaatgtggctagttctgtgcctgtggaaaactttactattcatggagggctgagccggatcttgaagactcgtggggaaatggtgaagaaccggactgtggactgggctctagcggagtacatggcgtttggctcgctcctgaaggagggcatccacattcggctgagcggccaggacgtggagcggggcacattcagccaccgccaccatgtgctccatgaccagaatgtggacaagagaacctgcatccccatgaaccatctctggcccaatcaggccccctatactgtgtgcaacagctcactgtctgagtacggcgtgctgggctttgagctgggcttcgccatggccagtcctaatgccctggtcctctgggaagcccaatttggtgacttccacaacacggcccagtgtatcatcgaccagttcatctgcccgggacaagccaagtgggtgcggcagaatggcatcgtgttgctgctgccccatggcatggagggcatgggtccagaacattcctccgcccgcccagagcggttcttgcagatgtgcaacgatgacccagatgtcctgccagaccttaaagaagccaacttcgacatcaatcagctatatgactgcaattgggttgttgtcaactgctccactcctggcaacttcttccacgtgctacgacgccagatcctgctgccattccggaagccgttaattatcttcacccccaaatccctgttgcgccaccccgaggccagatccagctttgatgagatgcttccaggaacccacttccagcgggtgatcccagaagatggccctgcagctcagaacccagaaaatgtcaaaaggcttctcttctgcaccggcaaagtgtattatgacctcacccgggagcgcaaagcacgcgacatggtggggcaggtggccatcacaaggattgagcagctgtcgccattcccctttgacctcctgctgaaggaggtgcagaagtaccccaatgctgagctggcctggtgccaggaggagcacaagaaccaaggctactatgactacgtgaagccaagacttcggaccaccatcagccgcgccaagcccgtctggtatgccggccgggacccagcggctgctccagccaccggcaacaagaagacccacctgacggagctgcagcgcctcctggacacggccttcgacctggacgtcttcaagaacttctcgtagatgctgcctagggttgcttgggccactgccctctccacacccatgactgccccttgcttctcaactaaagaatagtgcctcagcgctgcccacaccaccgccctcctcgctgtgccaccacccctccctctgctctcataggagttaggctgtcgtccccctccagtgcttggctgccccacaggccacacgctgcccaggctctgctgacttctgagcagttttccaggaggccggggggagcaggaggaggaaaggtagcccccgagggatgtccttggggaggggtcagctctggccacaatcctccccaccagtctcacccactaggataggaactgggccttgtgtgctggcttccgctgtcacccagcaaggcacaggctcctgtatttgagactaggatagcttcatcttgagcctgagccttagaatctgtagaggagcctggagtcggatctagccatggctggcagaggtttctagggtgggccccagccgtggcgtgaactgaggatgacccggggcagctggcaggagagagccttggcctgacctggcacagaaagggcagcttcagtctctgcagtgtccattatctgctgttccttcgagggttccaggctgtgtgtggggcccaagcatgccccacccacccctcctgggcccaggcagcacctggagcccacagagtctgtgtgtagccaggaagccccgctcaggtagccaccgccggggcactggctgctctgtcttggtcctgttaaccctccacctcctctcttggactccctccccaccccaaccactctttctttctcctttaacccaatggagactttctgatgcatcgttttctttgctgtgccaaagcaggtcagaagagggagaggaggggctgggggtgaggggccaggccatggccaaggggccagctgcccctcatttatcactctgaccttcacagggacagatctgatttatttattttggttaaaaaaaaaaaaaaggaacagaaacaactttgcattgcattggcttgacccataaactaagttatatccgtg

SEQ ID NO: 1073 - DNA, 3373 bp, Homo sapiens
gagctgagccggagacaggtaaccgtgcgctgtcgccgcgcccgtcccagtgccgggtgtcgcggcgcttggcggcccggggttggagatcgcggcagttgtgaaaaacttcaggacaaaaatgtttcatttaaggacttgtgctgctaagttgaggccattgacggcttcccagactgttaagacattttcacaaaacagaccagcagcagctaggacatttcaacagattcggtgctattctgcacctgttgctgctgagccctttctcagtgggactagttcgaactatgtggaggagatgtactgtgcttggctggaaaaccccaaaagtgtacataagtcatgggacattttttttcgcaacacgaatgccggagccccaccgggcactgcctaccagagtccccttcccctgagccgaggctccctggctgctgtggcccatgcacagtccctggtagaagcacagcccaacgtggacaagctcgtggaggaccacctggcagtgcagtcgctcatcagggcatatcagatacgagggcaccatgtagcacagctggaccccctggggattttggatgctgatctggactcctccgtgcccgctgacattatctcatccacagacaaacttgggttctatggcctggatgagtctgacctcgacaaggtcttccacttgcccaccaccactttcatcgggggacaggaatcagcacttcctctgcgggagatcatccgtcggctggagatggcctactgccagcatattggggtggagttcatgttcatcaatgacctggagcagtgccagtggatccggcagaagtttgagacccctgggatcatgcagttcacaaatgaggagaaacggaccctgctggccaggcttgtgcggtccaccaggtttgaggagttcctacagcggaagtggtcctctgagaagcgctttggtctagaaggctgcgaggtactgatccctgccctcaagaccatcattgacaagtctagtgagaatggcgtggactacgtgatcatgggcatgccacacagagggcggctgaacgtgcttgcaaatgtcatcaggaaggagctggaacagatcttctgtcaattcgattcaaagctggaggcagctgatgagggctccggagatgtgaagtaccacctgggcatgtatcaccgcaggatcaatcgtgtcaccgacaggaacattaccttgtccttggtggccaacccttcccaccttgaggccgctgaccccgtggtgatgggcaagaccaaagccgaacagttttactgtggcgacactgaagggaaaaaggtcatgtccatcctgttgcatggggatgctgcatttgctggccagggcattgtgtacgagaccttccacctcagcgacctgccatcctacacaactcatggcaccgtgcacgtggtcgtcaacaaccagatcggcttcaccaccgaccctcggatggcccgctcctccccctaccccactgacgtggcccgagtggtgaatgcccccattttccacgtgaactcagatgaccccgaggctgtcatgtacgtgtgcaaagtggcggccgagtggaggagcaccttccacaaggacgtggttgtcgatttggtgtgttaccggcgcaacggccacaacgagatggatgagcccatgttcacgcagccgctcatgtacaagcagatccgcaagcagaagcctgtgttacagaagtacgctgagctgctggtgtcgcagggtgtggtcaaccagcctgagtatgaggaggaaatttccaagtatgataagatctgtgaggaagcttttgccagatctaaagatgagaagatcttgcacattaagcactggctggactctccctggcctggcttcttcaccctggacgggcagcccaggagcatgtcctgcccctccacgggtctgacggaggatattctgacacacatcgggaatgtggctagttctgtgcctgtggaaaactttactattcatggagggctgagccggatcttgaagactcgtggggaaatggtgaagaaccggactgtggactgggctctagcggagtacatggcgtttggctcgctcctgaaggagggcatccacattcggctgagcggccaggacgtggagcggggcacattcagccaccgccaccatgtgctccatgaccagaatgtggacaagagaacctgcatccccatgaaccatctctggcccaatcaggccccctatactgtgtgcaacagctcactgtctgagtacggcgtgctgggctttgagctgggcttcgccatggccagtcctaatgccctggtcctctgggaagcccaatttggtgacttccacaacacggcccagtgtatcatcgaccagttcatctgcccgggacaagccaagtgggtgcggcagaatggcatcgtgttgctgctgccccatggcatggagggcatgggtccagaacattcctccgcccgcccagagcggttcttgcagatgtgcaacgatgacccagatgtcctgccagaccttaaagaagccaacttcgacatcaatcagctatatgactgcaattgggttgttgtcaactgctccactcctggcaacttcttccacgtgctacgacgccagatcctgctgccattccggaagccgttaattatcttcacccccaaatccctgttgcgccaccccgaggccagatccagctttgatgagatgcttccaggaacccacttccagcgggtgatcccagaagatggccctgcagctcagaacccagaaaatgtcaaaaggcttctcttctgcaccggcaaagtgtattatgacctcacccgggagcgcaaagcacgcgacatggtggggcaggtggccatcacaaggattgagcagctgtcgccattcccctttgacctcctgctgaaggaggtgcagaagtaccccaatgctgagctggcctggtgccaggaggagcacaagaaccaaggctactatgactacgtgaagccaagacttcggaccaccatcagccgcgccaagcccgtctggtatgccggccgggacccagcggctgctccagccaccggcaacaagaagacccacctgacggagctgcagcgcctcctggacacggccttcgacctggacgtcttcaagaacttctcgtagatgctgcctagggttgcttgggccactgccctctccacacccatctgcccctcatttatcactctgaccttcacagggacagatctgatttatttattttggttaaaaaaaaaaaaaaggaacagaaacaactttgcattgcattggcttgacccataaactaagttatatccgtgggca

SEQ ID NO: 1074 - DNA, 4122 bp, Homo sapiens
cgggttcgggtggagctgagccggagacaggcaattgtgaaaaacttcaggacaaaaatgtttcatttaaggacttgtgctgctaagttgaggccattgacggcttcccagactgttaagacattttcacaaaacagaccagcagcagctaggacatttcaacagattcggtgctattctgcacctgttgctgctgagccctttctcagtgggactagttcgaactatgtggaggagatgtactgtgcttggctggaaaaccccaaaagtgtacataagtcatgggacattttttttcgcaacacgaatgccggagccccaccgggcactgcctaccagagtccccttcccctgagccgaggctccctggctgctgtggcccatgcacagtccctggtagaagcacagcccaacgtggacaagctcgtggaggaccacctggcagtgcagtcactcatcagggcatatcagatacgagggcaccatgtagcacagctggaccccctggggattttggatgctgatctggactcctccgtgcccgctgacattatctcatccacagacaaacttgggttctatggcctggatgagtctgacctcgacaaggtcttccacttgcccaccaccactttcatcgggggacaggaatcagcacttcctctgcgggagatcatccgtcggctggagatggcctactgccagcatattggggtggagttcatgttcatcaatgacctggagcagtgccagtggatccggcagaagtttgagacccctgggatcatgcagttcacaaatgaggagaaacggaccctgctggccaggcttgtgcggtccaccaggtttgaggagttcctacagcggaagtggtcctctgagaagcgctttggtctagaaggctgcgaggtactgatccctgccctcaagaccatcattgacaagtctagtgagaatggcgtggactacgtgatcatgggcatgccacacagagggcggctgaacgtgcttgcaaatgtcatcaggaaggagctggaacagatcttctgtcaattcgattcaaagctggaggcagctgatgagggctccggagatgtgaagtaccacctgggcatgtatcaccgcaggatcaatcgtgtcaccgacaggaacattaccttgtccttggtggccaacccttcccaccttgaggccgctgaccccgtggtgatgggcaagaccaaagccgaacagttttactgtggcgacactgaagggaaaaaggtcatgtccatcctgttgcatggggatgctgcatttgctggccagggcattgtgtacgagaccttccacctcagcgacctgccatcctacacaactcatggcaccgtgcacgtggtcgtcaacaaccagatcggcttcaccaccgaccctcggatggcccgctcctccccctaccccactgacgtggcccgagtggtgaatgcccccattttccacgtgaactcagatgaccccgaggctgtcatgtacgtgtgcaaagtggcggccgagtggaggagcaccttccacaaggacgtggttgtcgatttggtgtgttaccggcgcaacggccacaacgagatggatgagcccatgttcacgcagccgctcatgtacaagcagatccgcaagcagaagcctgtgttacagaagtacgctgagctgctggtgtcgcagggtgtggtcaaccagcctgagtatgaggaggaaatttccaagtatgataagatctgtgaggaagcttttgccagatctaaagatgagaagatcttgcacattaagcactggctggactctccctggcctggcttcttcaccctggacgggcagcccaggagcatgtcctgcccctccacgggtctgacggaggatattctgacacacatcgggaatgtggctagttctgtgcctgtggaaaactttactattcatggagggctgagccggatcttgaagactcgtggggaaatggtgaagaaccggactgtggactgggctctagcggagtacatggcgtttggctcgctcctgaaggagggcatccacattcggctgagcggccaggacgtggagcggggcacattcagccaccgccaccatgtgctccatgaccagaatgtggacaagagaacctgcatccccatgaaccatctctggcccaatcaggccccctatactgtgtgcaacagctcactgtctgagtacggcgtgctgggctttgaagctgggcttcgcatggccagtcctaatgccctggtcctctgggaagcccaatttggtgacttccacaacacggcccagtgtatcatcgaccagttcatctgcccgggacaagccaagtgggtgcggcagaatggcatcgtgttgctgctgccccatggcatggagggcatgggtccagaacattcctccgcccgcccagagcggttcttgcagatgtgcaacgatgacccagatgtcctgccagaccttaaagaagccaacttcgacatcaatcagctatatgactgcaattgggttgttgtcaactgctccactcctggcaacttcttccacgtgctacgacgccagatcctgctgccattccggaagccgttaattatcttcacccccaaatccctgttgcgccaccccgaggccagatccagctttgatgagatgcttccaggaacccacttccagcgggtgatcccagaagatggccctgcagctcagaacccagaaaatgtcaaaaggcttctcttctgcaccggcaaagtgtattatgacctcacccgggagcgcaaagcacgcgacatggtggggcaggtggccatcacaaggattgagcagctgtcgccattcccctttgacctcctgctgaaggaggtgcagaagtaccccaatgctgagctggcctggtgccaggaggagcacaagaaccaaggctactatgactacgtgaagccaagacttcggaccaccatcagccgcgccaagcccgtctggtatgccggccggaacccagcggctgctccagccaccggcaacaagaagacccactgacggagctgcagcgcctcctggacacggccttcgacctggacgtcttcaagaacttctcgtagatgctgcctagggttgcttgggccactgccctctccacacccatgactgccccttgcttctcaactaaagaatagtgcctcagcgctgcccacaccaccgtcctcctcgctgtgccaccacccctccctctgctctcataggagttaggctgtcgtccccctccagtgcttggctgccccacaggccacacgctgcccaggctctgctgacttctgagcagttttccaggaggccggggggagcaggaggaggaaaggtagcccccgagggatgtccttggggaggggtcagctctggccccaatcctccccaccagtctcacccactaggataggaactgggccttgtgtgctggcttccgctgtcacccagcaaggcacaggctcctgtatttgagactaggatagcttcatcttgagcctgagccttagaatctgtagaggagcctggagtcggatctagccatggctggcagaggtttctagggtgggccccagccgtggcgtgaactgaggatgacccggggcagctggcaggagagagccttggcctgacctggcacagaaagggcagcttcagtctctgcagtgtccattatctgctgttccttcgagggttccaggctgtgtgtggggcccaagcatgccccacccaccctcctgggcccaggcagcacctggagcccacagagtctgtgtgtagccaggaagccccgctcaggtagccaccgccggggcactggctgctctgtcttggtcctgttaaccctccacctcctctcttggactccctccccaccccaaccactctttctttctcctttaacccaatggagactttctgatgcatcgttttctttgctgtgccaaagcaggtcagaagagggagaggaggggctgggggtgaggggccaggccatggccaaggggccagctgcccctcatttatcactctgaccttcacagggacagatctgatttatttattttggtt

SEQ ID NO: 1075 - DNA, 4260 bp, Homo sapiens
gagctgagccggagacaggtaaccgtgcgctgtcgccgcgcccgtcccagtgccgggtgtcgcggcgcttggcggcccggggttggagatcgcggcagttgtgaaaaacttcaggacaaaaatgtttcatttaaggacttgtgctgctaagttgaggccattgacggcttcccagactgttaagacattttcacaaaacagaccagcagcagctaggacatttcaacagattcggtgctattctgcacctgttgctgctgagccctttctcagtgggactagttcgaactatgtggaggagatgtactgtgcttggctggaaaaccccaaaagtgtacataagtcatgggacattttttttcgcaacacgaatgccggagccccaccgggcactgcctaccagagtccccttcccctgagccgaggctccctggctgctgtggcccatgcacagtccctggtagaagcacagcccaacgtggacaagctcgtggaggaccacctggcagtgcagtcgctcatcagggcatatcagatacgagggcaccatgtagcacagctggaccccctggggattttggatgctgatctggactcctccgtgcccgctgacattatctcatccacagacaaacttgggttctatggcctggatgagtctgacctcgacaaggtcttccacttgcccaccaccactttcatcgggggacaggaatcagcacttcctctgcgggagatcatccgtcggctggagatggcctactgccagcatattggggtggagttcatgttcatcaatgacctggagcagtgccagtggatccggcagaagtttgagacccctgggatcatgcagttcacaaatgaggagaaacggaccctgctggccaggcttgtgcggtccaccaggtttgaggagttcctacagcggaagtggtcctctgagaagcgctttggtctagaaggctgcgaggtactgatccctgccctcaagaccatcattgacaagtctagtgagaatggcgtggactacgtgatcatgggcatgccacacagagggcggctgaacgtgcttgcaaatgtcatcaggaaggagctggaacagatcttctgtcaattcgattcaaagctggaggcagctgatgagggctccggagatgtgaagtaccacctgggcatgtatcaccgcaggatcaatcgtgtcaccgacaggaacattaccttgtccttggtggccaacccttcccaccttgaggccgctgaccccgtggtgatgggcaagaccaaagccgaacagttttactgtggcgacactgaagggaaaaaggtcatgtccatcctgttgcatggggatgctgcatttgctggccagggcattgtgtacgagaccttccacctcagcgacctgccatcctacacaactcatggcaccgtgcacgtggtcgtcaacaaccagatcggcttcaccaccgaccctcggatggcccgctcctccccctaccccactgacgtggcccgagtggtgaatgcccccattttccacgtgaactcagatgaccccgaggctgtcatgtacgtgtgcaaagtggcggccgagtggaggagcaccttccacaaggacgtggttgtcgatttggtgtgttaccggcgcaacggccacaacgagatggatgagcccatgttcacgcagccgctcatgtacaagcagatccgcaagcagaagcctgtgttacagaagtacgctgagctgctggtgtcgcagggtgtggtcaaccagcctgagtatgaggaggaaatttccaagtatgataagatctgtgaggaagcttttgccagatctaaagatgagaagatcttgcacattaagcactggctggactctccctggcctggcttcttcaccctggacgggcagcccaggagcatgtcctgcccctccacgggtctgacggaggatattctgacacacatcgggaatgtggctagttctgtgcctgtggaaaactttactattcatggagggctgagccggatcttgaagactcgtggggaaatggtgaagaaccggactgtggactgggctctagcggagtacatggcgtttggctcgctcctgaaggagggcatccacattcggctgagcggccaggacgtggagcggggcacattcagccaccgccaccatgtgctccatgaccagaatgtggacaagagaacctgcatccccatgaaccatctctggcccaatcaggccccctatactgtgtgcaacagctcactgtctgagtacggcgtgctgggctttgagctgggcttcgccatggccagtcctaatgccctggtcctctgggaagcccaatttggtgacttccacaacacggcccagtgtatcatcgaccagttcatctgcccgggacaagccaagtgggtgcggcagaatggcatcgtgttgctgctgccccatggcatggagggcatgggtccagaacattcctccgcccgcccagagcggttcttgcagatgtgcaacgatgacccagatgtcctgccagaccttaaagaagccaacttcgacatcaatcagctatatgactgcaattgggttgttgtcaactgctccactcctggcaacttcttccacgtgctacgacgccagatcctgctgccattccggaagccgttaattatcttcacccccaaatccctgttgcgccaccccgaggccagatccagctttgatgagatgcttccaggaacccacttccagcgggtgatcccagaagatggccctgcagctcagaacccagaaaatgtcaaaaggcttctcttctgcaccggcaaagtgtattatgacctcacccgggagcgcaaagcacgcgacatggtggggcaggtggccatcacaaggattgagcagctgtcgccattcccctttgacctcctgctgaaggaggtgcagaagtaccccaatgctgagctggcctggtgccaggaggagcacaagaaccaaggctactatgactacgtgaagccaagacttcggaccaccatcagccgcgccaagcccgtctggtatgccggccgggacccagcggctgctccagccaccggcaacaagaagacccacctgacggagctgcagcgcctcctggacacggccttcgacctggacgtcttcaagaacttctcgtagatgctgcctagggttgcttgggccactgccctctccacacccatgactgccccttgcttctcaactaaagaatagtgcctcagcgctgcccacaccaccgccctcctcgctgtgccaccacccctccctctgctctcataggagttaggctgtcgtccccctccagtgcttggctgccccacaggccacacgctgcccaggctctgctgacttctgagcagttttccaggaggccggggggagcaggaggaggaaaggtagcccccgagggatgtccttggggaggggtcagctctggccacaatcctccccaccagtctcacccactaggataggaactgggccttgtgtgctggcttccgctgtcacccagcaaggcacaggctcctgtatttgagactaggatagcttcatcttgagcctgagccttagaatctgtagaggagcctggagtcggatctagccatggctggcagaggtttctagggtgggccccagccgtggcgtgaactgaggatgacccggggcagctggcaggagagagccttggcctgacctggcacagaaagggcagcttcagtctctgcagtgtccattatctgctgttccttcgagggttccaggctgtgtgtggggcccaagcatgccccacccacccctcctgggcccaggcagcacctggagcccacagagtctgtgtgtagccaggaagccccgctcaggtagccaccgccggggcactggctgctctgtcttggtcctgttaaccctccacctcctctcttggactccctccccaccccaaccactctttctttctcctttaacccaatggagactttctgatgcatcgttttctttgctgtgccaaagcaggtcagaagagggagaggaggggctgggggtgaggggccaggccatggccaaggggccagctgcccctcatttatcactctgaccttcacagggacagatctgatttatttattttggttaaaaaaaaaaaaaaggaacagaaacaactttgcattgcattggcttgacccataaactaagttatatccgtg

SEQ ID NO: 1076 - DNA, 4253 bp, Homo sapiens
acgccatacgccggggcggggccgagagtttggagccccggagtggggtgtcggcgcctcattcgggtggagctgagccggagacaggcagttgtgaaaaacttcaggacaaaaatgtttcatttaaggacttgtgctgctaagttgaggccattgacggcttcccagactgttaagacattttcacaaaacagaccagcagcagctaggacatttcaacagattcggtgctattctgcacctgttgctgctgagccctttctcagtgggactagttcgaactatgtggaggagatgtactgtgcttggctggaaaaccccaaaagtgtacataagtcatgggacattttttttcgcaacacgaatgccggagccccaccgggcactgcctaccagagtccccttcccctgagccgaggctccctggctgctgtggcccatgcacagtccctggtagaagcacagcccaacgtggacaagctcgtggaggaccacctggcagtgcagtcgctcatcagggcatatcagatacgagggcaccatgtagcacagctggaccccctggggattttggatgctgatctggactcctccgtgcccgctgacattatctcatccacagacaaacttgggttctatggcctggatgagtctgacctcgacaaggtcttccacttgcccaccaccactttcatcgggggacaggaatcagcacttcctctgcgggagatcatccgtcggctggagatggcctactgccagcatattggggtggagttcatgttcatcaatgacctggagcagtgccagtggatccggcagaagtttgagacccctgggatcatgcagttcacaaatgaggagaaacggaccctgctggccaggcttgtgcggtccaccaggtttgaggagttcctacagcggaagtggtcctctgagaagcgctttggtctagaaggctgcgaggtactgatccctgccctcaagaccatcattgacaagtctagtgagaatggcgtggactacgtgatcatgggcatgccacacagagggcggctgaacgtgcttgcaaatgtcatcaggaaggagctggaacagatcttctgtcaattcgattcaaagctggaggcagctgatgagggctccggagatgtgaagtaccacctgggcatgtatcaccgcaggatcaatcgtgtcaccgacaggaacattaccttgtccttggtggccaacccttcccaccttgaggccgctgaccccgtggtgatgggcaagaccaaagccgaacagttttactgtggcgacactgaagggaaaaaggtcatgtccatcctgttgcatggggatgctgcatttgctggccagggcattgtgtacgagaccttccacctcagcgacctgccatcctacacaactcatggcaccgtgcacgtggtcgtcaacaaccagatcggcttcaccaccgaccctcggatggcccgctcctccccctaccccactgacgtggcccgagtggtgaatgcccccattttccacgtgaactcagatgaccccgaggctgtcatgtacgtgtgcaaagtggcggccgagtggaggagcaccttccacaaggacgtggttgtcgatttggtgtgttaccggcgcaacggccacaacgagatggatgagcccatgttcacgcagccgctcatgtacaagcagatccgcaagcagaagcctgtgttacagaagtacgctgagctgctggtgtcgcagggtgtggtcaaccagcctgagtatgaggaggaaatttccaagtatgataagatctgtgaggaagcttttgccagatctaaagatgagaagatcttgcacattaagcactggctggactctccctggcctggcttcttcaccctggacgggcagcccaggagcatgtcctgcccctccacgggtctgacggaggatattctgacacacatcgggaatgtggctagttctgtgcctgtggaaaactttactattcatggagggctgagccggatcttgaagactcgtggggaaatggtgaagaaccggactgtggactgggctctagcggagtacatggcgtttggctcgctcctgaaggagggcatccacattcggctgagcggccaggacgtggagcggggcacattcagccaccgccaccatgtgctccatgaccagaatgtggacaagagaacctgcatccccatgaaccatctctggcccaatcaggccccctatactgtgtgcaacagctcactgtctgagtacggcgtgctgggctttgagctgggcttcgccatggccagtcctaatgccctggtcctctgggaagcccaatttggtgacttccacaacacggcccagtgtatcatcgaccagttcatctgcccgggacaagccaagtgggtgcggcagaatggcatcgtgttgctgctgccccatggcatggagggcatgggtccagaacattcctccgcccgcccagagcggttcttgcagatgtgcaacgatgacccagatgtcctgccagaccttaaagaagccaacttcgacatcaatcagctatatgactgcaattgggttgttgtcaactgctccactcctggcaacttcttccacgtgctacgacgccagatcctgctgccattccggaagccgttaattatcttcacccccaaatccctgttgcgccaccccgaggccagatccagctttgatgagatgcttccaggaacccacttccagcgggtgatcccagaagatggccctgcagctcagaacccagaaaatgtcaaaaggcttctcttctgcaccggcaaagtgtattatgacctcacccgggagcgcaaagcacgcgacatggtggggcaggtggccatcacaaggattgagcagctgtcgccattcccctttgacctcctgctgaaggaggtgcagaagtaccccaatgctgagctggcctggtgccaggaggagcacaagaaccaaggctactatgactacgtgaagccaagacttcggaccaccatcagccgcgccaagcccgtctggtatgccggccgggacccagcggctgctccagccaccggcaacaagaagacccacctgacggagctgcagcgcctcctggacacggccttcgacctggacgtcttcaagaacttctcgtagatgctgcctagggttgcttgggccactgccctctccacacccatgactgccccttgcttctcaactaaagaatagtgcctcagcgctgcccacaccaccgccctcctcgctgtgccaccacccctccctctgctctcataggagttaggctgtcgtccccctccagtgcttggctgccccacaggccacacgctgcccaggctctgctgacttctgagcagttttccaggaggccggggggagcaggaggaggaaaggtagcccccgagggatgtccttggggaggggtcagctctggccacaatcctccccaccagtctcacccactaggataggaactgggccttgtgtgctggcttccgctgtcacccagcaaggcacaggctcctgtatttgagactaggatagcttcatcttgagcctgagccttagaatctgtagaggagcctggagtcggatctagccatggctggcagaggtttctagggtgggccccagccgtggcgtgaactgaggatgacccggggcagctggcaggagagagccttggcctgacctggcacagaaagggcagcttcagtctctgcagtgtccattatctgctgttccttcgagggttccaggctgtgtgtggggcccaagcatgccccacccacccctcctgggcccaggcagcacctggagcccacagagtctgtgtgtagccaggaagccccgctcaggtagccaccgccggggcactggctgctctgtcttggtcctgttaaccctccacctcctctcttggactccctccccaccccaaccactctttctttctcctttaacccaatggagactttctgatgcatcgttttctttgctgtgccaaagcaggtcagaagagggagaggaggggctgggggtgaggggccaggccatggccaaggggccagctgcccctcatttatcactctgaccttcacagggacagatctgatttatttattttggttaaaaaaaaaaaaaaggaacagaaacaactttgcattgcattggcttgacccataaactaagttatatccgtg

SEQ ID NO: 1077 - DNA, 2384 bp, Homo sapiens
gagcagtcggagccgcagctgcctcccggagcccgagcccctccctccgggtccggcctagcccgcctgactcccactctgatcacctccacagcccgccgacctgagaactactacgcccatgagccttcgcggcgccggtgatttaggggacgctcctcagtgccccctgcgaccgccagagagaactacgttgcccctcagcccgagaggcgcgagtggtggaaaacctctccatcatactccgccctcgagacaccagccccctccatgacgtcttcagccgcgcgcccgacgtcggctgagacggccatagacactggcggctagaggggcccggacttgccctcccagctctaacttccgccggaagtgccttccagccgcaggcgcccttcttcttctgtgcgctcgggctcctggtcccggctccccggttaccggggcgcgagtatgaccacaatggcggccgccaccctgctgcgcgcgacgccccacttcagcggtctcgccgccggccggaccttcctgctgcagggtctgttgcggctgctgaaagccccggcattgcctctcttgtgccgcggcctggccgtggaggccaagaagacttacgtgcgcgacaagccacatgtgaatgtgggtaccatcggccatgtggaccacgggaagaccacgctgactgcagccatcacgaagattctagctgagggaggtggggctaagttcaagaagtacgaggagattgacaatgccccggaggagcgagctcggggtatcaccatcaatgcggctcatgtggagtatagcactgccgcccgccactacgcccacacagactgcccgggtcatgcagattatgttaagaatatgatcacaggcactgcacccctcgacggctgcatcctggtggtagcagccaatgacggccccatgccccagacccgagagcacttattactggccagacagattggggtggagcatgtggtggtgtatgtgaacaaggctgacgctgtccaggactctgagatggtggaactggtggaactggagatccgggagctgctcaccgagtttggctataaaggggaggagaccccagtcatcgtaggctctgctctctgtgcccttgagggtcgggaccctgagttaggcctgaagtctgtgcagaagctactggatgctgtggacacttacatcccagtgcccgcccgggacctggagaagcctttcctgctgcctgtggaggcggtgtactccgtccctggccgtggcaccgtggtgacaggtacactagagcgtggcattttaaagaagggagacgagtgtgagctcctaggacatagcaagaacatccgcactgtggtgacaggcattgagatgttccacaagagcctggagagggccgaggccggagataacctcggggccctggtccgaggcttgaagcgggaggacttgcggcggggcctggtcatggtcaagccaggttccatcaagccccaccagaaggtggaggcccaggtttacatcctcagcaaggaggaaggtggccgccacaagccctttgtgtcccacttcatgcctgtcatgttctccctgacttgggacatggcctgtcggattatcctgcccccagagaaggagcttgccatgcccggggaggacctgaagttcaacctaatcttgcggcagccaatgatcttagagaaaggccagcgtttcaccctgcgagatggcaaccggactattggcaccggtctagtcaccaacacgctggccatgactgaggaggagaagaatatcaaatggggttgagtgtgcagatctctgctcagcttcccttgcgtttaaggcctgccctagccagggctccctcctgcttccagtaccctctcatggcataggctgcaacccagcagagggcagctagatggacatttcccctgctcggaagggttggcctgcctggctggggaggtcagtaaactttgaatagtaagccagcctgtgtcctgtgtcctttgtgcaaattggagaggataggggaggacaaaaagggtgttgaaccccagacagatggggagcttgtgagatcccagagcagttttaacggataaatcaagtccagtgagcttagtgattgcctagacacagtaggatgccgttattcagcctcctgggagatagtgggaaagaatgttctatcgctctggagccagcatggcttcagctcaggtgccaaacccatcttgtttcctcggaatactaagtgaatgtctagcatccattcacattctgtgggaacagggactggacaggcatacctcagatgctgtaggtttgcttccagactaccacaataaagcaggtcacaaatt

SEQ ID NO: 1078 - DNA, 2512 bp, Homo sapiens
gagcagtcggagccgcagctgcctcccggagcccgagcccctccctccgggtccggcctagcccgcctgactcccactctgatcacctccacagcccgccgacctgagaactactacgcccatgagccttcgcggcgccggtgatttaggggacgctcctcagtgccccctgcgaccgccagagagaactacgttgcccctcagcccgagaggcgcgagtggtggaaaacctctccatcatactccgccctcgagacaccagccccctccatgacgtcttcagccgcgcgcccgacgtcggctgagacggccatagacactggcggctagaggggcccggacttgccctcccagctctaacttccgccggaagtgccttccagccgcaggcgcccttcttcttctgtgcgctcgggctcctggtcccggctccccggttaccggggcgcgagtatgaccacaatggcggccgccaccctgctgcgcgcgacgccccacttcagcggtctcgccgccggccggaccttcctgctgcagggtctgttgcggctgctgaaagccccggcattgcctctcttgtgccgcggcctggccgtggaggccaagaagacttacgtgcgcgacaagccacatgtgaatgtgggtaccatcggccatgtggaccacgggaagaccacgctgactgcagccatcacgaagattctagctgagggaggtggggctaagttcaagaagtacgaggagattgacaatgccccggaggagcgagctcggggtatcaccatcaatgcggctcatgtggagtatagcactgccgcccgccactacgcccacacagactgcccgggtcatgcagattatgttaagaatatgatcacaggcactgcacccctcgacggctgcatcctggtggtagcagccaatgacggccccatgccccagacccgagagcacttattactggccagacagattggggtggagcatgtggtggtgtatgtgaacaaggctgacgctgtccaggactctgagatggtggaactggtggaactggagatccgggagctgctcaccgagtttggctataaaggggaggagaccccagtcatcgtaggctctgctctctgtgcccttgagggtcgggaccctgagttaggcctgaagtctgtgcagaagctactggatgctgtggacacttacatcccagtgcccgcccgggacctggagaagcctttcctgctgcctgtggaggcggtgtactccgtccctggccgtggcaccgtggtgacaggtacactagagcgtggcattttaaagaagggagacgagtgtgagctcctaggacatagcaagaacatccgcactgtggtgacaggtttgggaagccagtctggagagcagggcctggctgaagggtggccttaccccggcagatcccttgtgccttccctctgtctcacattcgccttccttctccctgctccttttccctttccgtcctaggcattgagatgttccacaagagcctggagagggccgaggccggagataacctcggggccctggtccgaggcttgaagcgggaggacttgcggcggggcctggtcatggtcaagccaggttccatcaagccccaccagaaggtggaggcccaggtttacatcctcagcaaggaggaaggtggccgccacaagccctttgtgtcccacttcatgcctgtcatgttctccctgacttgggacatggcctgtcggattatcctgcccccagagaaggagcttgccatgcccggggaggacctgaagttcaacctaatcttgcggcagccaatgatcttagagaaaggccagcgtttcaccctgcgagatggcaaccggactattggcaccggtctagtcaccaacacgctggccatgactgaggaggagaagaatatcaaatggggttgagtgtgcagatctctgctcagcttcccttgcgtttaaggcctgccctagccagggctccctcctgcttccagtaccctctcatggcataggctgcaacccagcagagggcagctagatggacatttcccctgctcggaagggttggcctgcctggctggggaggtcagtaaactttgaatagtaagccagcctgtgtcctgtgtcctttgtgcaaattggagaggataggggaggacaaaaagggtgttgaaccccagacagatggggagcttgtgagatcccagagcagttttaacggataaatcaagtccagtgagcttagtgattgcctagacacagtaggatgccgttattcagcctcctgggagatagtgggaaagaatgttctatcgctctggagccagcatggcttcagctcaggtgccaaacccatcttgtttcctcggaatactaagtgaatgtctagcatccattcacattctgtgggaacagggactggacaggcatacctcagatgctgtaggtttgcttccagactaccacaataaagcaggtcacaaatt

SEQ ID NO: 1079 - DNA, 1627 bp, Homo sapiens
cttctgtgcgctcgggctcctggtcccggctccccggttaccggggcgcgagtatgaccacaatggcggccgccaccctgctgcgcgcgacgccccacttcagcggtctcgccgccggccggaccttcctgctgcagggtctgttgcggctgctgaaagccccggcattgcctctcttgtgccgcggcctggccgtggaggccaagaagacttacgtgcgcgacaagccacatgtgaatgtgggtaccatcggccatgtggaccacgggaagaccacgctgactgcagccatcacgaagattctagctgagggaggtggggctaagttcaagaagtacgaggagattgacaatgccccggaggagcgagctcggggtatcaccatcaatgcggctcatgtggagtatagcactgccgcccgccactacgcccacacagactgcccgggtcatgcagattatgttaagaatatgatcacaggcactgcacccctcgacggctgcatcctggtggtagcagccaatgacggccccatgccccagacccgagagcacttattactggccagacagattggggtggagcatgtggtggtgtatgtgaacaaggctgacgctgtccaggactctgagatggtggaactggtggaactggagatccgggagctgctcaccgagtttggctataaaggggaggagaccccagtcatcgtaggctctgctctctgtgcccttgagggtcgggaccctgagttaggcctgaagtctgtgcagaagctactggatgctgtggacacttacatcccagtgcccgcccgggacctggagaagcctttcctgctgcctgtggaggcggtgtactccgtccctggccgtggcaccgtggtgacaggtacactagagcgtggcattttaaagaagggagacgagtgtgagctcctaggacatagcaagaacatccgcactgtggtgacaggcattgagatgttccacaagagcctggagagggccgaggccggagataacctcggggccctggtccgaggcttgaagcgggaggacttgcggcggggcctggtcatggtcaagccaggttccatcaagccccaccagaaggtggaggcccaggtttacatcctcagcaaggaggaaggtggccgccacaagccctttgtgtcccacttcatgcctgtcatgttctccctgacttgggacatggcctgtcggattatcctgcccccagagaaggagcttgccatgcccggggaggacctgaagttcaacctaatcttgcggcagccaatgatcttagagaaaggccagcgtttcaccctgcgagatggcaaccggactattggcaccggtctagtcaccaacacgctggccatgactgaggaggagaagaatatcaaatggggttgagtgtgcagatctctgctcagcttcccttgcgtttaaggcctgccctagccagggctccctcctgcttccagtaccctctcatggcataggctgcaacccagcagagggcagctagatggacatttcccctgctcggaagggttggcctgcctggctggggaggtcagtaaactttgaatagtaaaaaaaaaaaaaaaaaaaaaaaa

SEQ ID NO: 1080 - DNA, 5362 bp, Homo sapiens
tttatagcagcagcagaaatataccaccctagaggacacacctccttttagctaggtacctataaatgtccaggattttctattcaattgagaagaacccagcaaaatggggatctccacagtcatccttgaaatgtgtcttttatggggacaagttctatctacaggtgggtggatcccaaggactacagactacgcttcactgattccctcggaggtgcccttggatacaactgtagcagaaggttctccatttccctcggagttgaccctggagtcaactgtagcagaaggttctccgatttccttggagtcaaccctggagtcaactgtagcagaaggttctctgattccctcagagtcaaccctggagtcaactgtagcagaaggatctgattctggtttggccctgaggctggtgaatggagatggcaggtgtcagggccgagtggagatcctataccgaggctcctggggcaccgtgtgtgatgacagctgggacaccaatgatgccaacgtggtctgtaggcagctgggttgtggctgggccatgtcagctccaggaaatgcctggtttggccagggctcaggacccattgccctggatgatgtgcgctgctcaggacacgaatcctacctgtggagctgcccccacaatggctggctctcccataactgtggccatggtgaagatgctggtgttatctgctcagctgcccagcctcagtcaacactcaggccagaaagttggcctgtcaggatatcaccacctgtacccacagaaggatctgaatccagtttggccctgaggctggtgaatggaggcgacaggtgtcgaggccgagtggaggtcctataccgaggctcctggggcaccgtgtgtgatgactactgggacaccaatgatgccaatgtggtctgcaggcagctgggctgtggctgggccatgtcagccccaggaaatgcccagtttggccagggctcaggacccattgtcctggatgatgtgcgctgctcaggacacgagtcctacctgtggagctgcccccacaatggctggctcacccacaactgtggccatagtgaagacgctggtgtcatctgctcagctccccagtcccggccgacacccagcccaggatctgaatccagtttggccctgaggctggtgaatggaggtgacaggtgtcagggccgagtggaggtcctataccgaggctcctggggcaccgtgtgtgatgatagctgggacaccagtgacgccaatgtggtctgccggcagctgggctgtggctgggccacgtcagccccaggaaatgcccggtttggccagggttcaggacccattgtcctggatgacgtgcgctgctcaggctatgagtcctacctgtggagctgcccccacaatggctggctctcccataactgtcagcacagtgaagacgctggtgtcatctgctcagctgcccactcctggtcgacgcccagtccagacacattgccgaccatcaccttgcctgcatcgacagtaggatctgaatccagtttggccctgaggctggtgaatggaggtgacaggtgtcagggccgagtggaggtcctataccaaggctcctggggcaccgtgtgcgatgacagctgggacaccaatgatgccaatgtcgtctgcaggcaactgggctgtggctgggccatgtcagccccaggaaatgcccggtttggtcagggctcaggacccattgtcctggatgatgtgcgctgctcaggacacgagtcttacctgtggagctgcccccacaatggctggctctcccacaactgtggccatagtgaagacgctggtgtcatctgctcagcttcccagtcccggccaacacctagtccagacacttggccaacctcacatgcatcaacagcaggaggatctgaatccagtttggccctgaggctggtgaatggaggtgacaggtgtcagggccgagtggaggtcctataccgaggctcctggggcaccgtgtgtgatgactactgggacaccaatgatgccaatgtggtttgcaggcagctgggctgtggctgggccacgtcagccccaggaaatgcccggtttggccagggttcaggacccattgtcctggatgatgtgcgctgctcaggacatgagtcctatctgtggagctgcccccacaatggctggctctcccacaactgtggccatcatgaagacgctggtgtcatctgctcagcttcccagtcccagccgacacccagcccaggatctgaatccactttggccctgagactggtgaatggaggtgacaggtgtcgaggccgagtggaggtcctataccaaggctcctggggcaccgtgtgtgatgactactgggacaccaatgatgccaacgtggtctgcaggcagctgggctgtggctgggccatgtcagccccaggaaatgcccagtttggccagggctcaggacccattgtcctggatgatgtgcgctgctcaggacacgagtcttacctgtggagctgcccccacaatggctggctctcccacaactgtggccatcatgaagatgctggtgtcatctgctcagctgctcagtcccagtcaacgcccaggccagatacttggctgaccaccaacttaccggcattgacagtaggatctgaatccagtttggctctgaggctggtgaatggaggtgacaggtgtcgaggccgagtggaggtcctgtatcgaggctcctggggaaccgtgtgtgatgacagctgggacaccaatgatgccaatgtggtctgcaggcagctgggctgtggctgggccatgtcggccccaggaaatgcccggtttggccagggctcaggacccattgtcctggatgatgtgcgctgctcagggaatgagtcctacctgtggagctgcccccacaaaggctggctcacccacaactgtggccatcacgaagacgctggtgtcatctgctcagccacccaaataaattctactacgacagattggtggcatccaacaactacaaccactgcaagaccctcttcaaattgtggtggcttcttattctatgccagtgggacattctccagcccatcctaccctgcatactaccccaacaatgctaagtgtgtttgggaaatagaagtgaattctggttatcgcataaacctgggcttcagtaatctgaaattggaggcacaccataactgcagttttgattatgttgaaatctttgatggatcattgaatagcagtctcctgctggggaaaatctgtaatgataccaggcaaatatttacatcttcttacaaccgaatgaccattcactttcgaagtgacatcagtttccaaaacactggctttttggcttggtataactccttcccaagcgatgccaccttgaggttggtcaatttaaattcatcctatggtctatgtgccgggcgtgtagaaatttaccatggtggcacctgggggacagtttgtgatgactcctggaccattcaggaagctgaggtggtctgcagacagctagggtgtggacgtgcagtttcagcccttggaaatgcatattttggctctggctctggccccatcaccctggacgatgtagagtgctcagggacggaatccactctctggcagtgccggaaccgaggctggttctcccacaactgtaatcatcgtgaagatgctggtgtcatctgctcaggaaaccatctatcgacacctgctccttttctcaacatcacccgtccaaacacagattattcctgcggaggcttcctatcccaaccatcaggggacttttccagcccattctatcccgggaactatccaaacaatgccaagtgtgtgtgggacattgaggtgcaaaacaactaccgtgtgactgtgatcttcagagatgtccagcttgaaggtggctgcaactatgattatattgaagttttcgatggcccctaccgcagttcccctctcattgctcgagtttgtgatggggccagaggctccttcacttcttcctccaacttcatgtccattcgcttcatcagtgaccacagcatcacaaggagagggttccgggctgagtactactccagtccctccaatgacagcaccaacctgctctgtctgccaaatcacatgcaagccagtgtgagcaggagctatctccaatccttgggcttttctgccagtgaccttgtcatttccacctggaatggatactacgagtgtcggccccagataacgccgaacctggtgatattcacaattccctactcaggctgcggcaccttcaagcaggcagacaatgacaccatcgactattccaacttcctcacagcagctgtctcaggtggcatcatcaagaggaggacagacctccgtattcacgtcagctgcagaatgcttcagaacacctgggtcgacaccatgtacattgctaatgacaccatccacgttgctaataacaccatccaggtcgaggaagtccagtatggcaattttgacgtgaacatttccttttatacttcctcatctttcttgtatcctgtgaccagccgcccttactacgtggacctgaaccaggacttgtacgttcaggctgaaatcctccattctgatgctgtactgaccttgtttgtggacacctgcgtggcatcaccatactccaatgacttcacgtctttgacttatgatctaatccggagtggatgcgtgagggatgacacctacggaccctactcctcgccatctcttcgcattgcccgcttccggttcagggccttccacttcctgaaccgcttcccctccgtgtacctgcgttgtaaaatggtggtgtgcagagcgtatgacccctcttcccgctgctaccgaggctgtgtgttgaggtcgaagagggatgtgggctcctaccaggaaaaggtggacgtcgtcctgggtcccatccagctgcagacccccccacgccgagaagaggagcctcggtaggtggtcgctctcagaccccactgtccaccggggcgcagacccctgactcggggacttgggatgttcctcttggtgtcatattccaactcagattgagccctacattgtgctgcacctggtcatacggagttgaatcagacctggttcccgcctcccccaaggctcatggtccttggaggacccgttgcagggcgaggtcaagagagttctgacctggatggcccatagacctgacgtcccagaatccatgcttctcatctgcaaaatgaaaatgtcaatacttacttcttagcactgttgagagggttacttacataaaggaattttggtgaaactgcctcagcctgt

SEQ ID NO: 1081 - DNA, 5415 bp, Homo sapiens
tttatagcagcagcagaaatataccaccctagaggacacacctccttttagctaggtacctataaatgtccaggattttctattcaattgagaagaacccagcaaaatggggatctccacagtcatccttgaaatgtgtcttttatggggacaagttctatctacaggtgggtggatcccaaggactacagactacgcttcactgattccctcggaggtgcccttggatacaactgtagcagaaggttctccatttccctcggagttgaccctggagtcaactgtagcagaaggttctccgatttccttggagtcaaccctggagtcaactgtagcagaaggttctctgattccctcagagtcaaccctggagtcaactgtagcagaaggatctgattctggtttggccctgaggctggtgaatggagatggcaggtgtcagggccgagtggagatcctataccgaggctcctggggcaccgtgtgtgatgacagctgggacaccaatgatgccaacgtggtctgtaggcagctgggttgtggctgggccatgtcagctccaggaaatgcctggtttggccagggctcaggacccattgccctggatgatgtgcgctgctcaggacacgaatcctacctgtggagctgcccccacaatggctggctctcccataactgtggccatggtgaagatgctggtgttatctgctcagctgcccagcctcagtcaacactcaggccagaaagttggcctgtcaggatatcaccacctgtacccacagaaggatctgaatccagtttggccctgaggctggtgaatggaggcgacaggtgtcgaggccgagtggaggtcctataccgaggctcctggggcaccgtgtgtgatgactactgggacaccaatgatgccaatgtggtctgcaggcagctgggctgtggctgggccatgtcagccccaggaaatgcccagtttggccagggctcaggacccattgtcctggatgatgtgcgctgctcaggacacgagtcctacctgtggagctgcccccacaatggctggctcacccacaactgtggccatagtgaagacgctggtgtcatctgctcagctccccagtcccggccgacacccagcccagatacttggccgacctcacatgcatcaacagcaggatctgaatccagtttggccctgaggctggtgaatggaggtgacaggtgtcagggccgagtggaggtcctataccgaggctcctggggcaccgtgtgtgatgatagctgggacaccagtgacgccaatgtggtctgccggcagctgggctgtggctgggccacgtcagccccaggaaatgcccggtttggccagggttcaggacccattgtcctggatgacgtgcgctgctcaggctatgagtcctacctgtggagctgcccccacaatggctggctctcccataactgtcagcacagtgaagacgctggtgtcatctgctcagctgcccactcctggtcgacgcccagtccagacacattgccgaccatcaccttgcctgcatcgacagtaggatctgaatccagtttggccctgaggctggtgaatggaggtgacaggtgtcagggccgagtggaggtcctataccaaggctcctggggcaccgtgtgcgatgacagctgggacaccaatgatgccaatgtcgtctgcaggcaactgggctgtggctgggccatgtcagccccaggaaatgcccggtttggtcagggctcaggacccattgtcctggatgatgtgcgctgctcaggacacgagtcttacctgtggagctgcccccacaatggctggctctcccacaactgtggccatagtgaagacgctggtgtcatctgctcagcttcccagtcccggccaacacctagtccagacacttggccaacctcacatgcatcaacagcaggatctgaatccagtttggccctgaggctggtgaatggaggtgacaggtgtcagggccgagtggaggtcctataccgaggctcctggggcaccgtgtgtgatgactactgggacaccaatgatgccaatgtggtttgcaggcagctgggctgtggctgggccacgtcagccccaggaaatgcccggtttggccagggttcaggacccattgtcctggatgatgtgcgctgctcaggacatgagtcctatctgtggagctgcccccacaatggctggctctcccacaactgtggccatcatgaagacgctggtgtcatctgctcagcttcccagtcccagccgacacccagcccagacacttggccaacctctcgtgcatcaacagcaggatctgaatccactttggccctgagactggtgaatggaggtgacaggtgtcgaggccgagtggaggtcctataccaaggctcctggggcaccgtgtgtgatgactactgggacaccaatgatgccaacgtggtctgcaggcagctgggctgtggctgggccatgtcagccccaggaaatgcccagtttggccagggctcaggacccattgtcctggatgatgtgcgctgctcaggacacgagtcttacctgtggagctgcccccacaatggctggctctcccacaactgtggccatcatgaagatgctggtgtcatctgctcagctgctcagtcccagtcaacgcccaggccagatacttggctgaccaccaacttaccggcattgacagtaggatctgaatccagtttggctctgaggctggtgaatggaggtgacaggtgtcgaggccgagtggaggtcctgtatcgaggctcctggggaaccgtgtgtgatgacagctgggacaccaatgatgccaatgtggtctgcaggcagctgggctgtggctgggccatgtcggccccaggaaatgcccggtttggccagggctcaggacccattgtcctggatgatgtgcgctgctcagggaatgagtcctacctgtggagctgcccccacaaaggctggctcacccacaactgtggccatcacgaagacgctggtgtcatctgctcagccacccaaataaattctactacgacagattggtggcatccaacaactacaaccactgcaagaccctcttcaaattgtggtggcttcttattctatgccagtgggacattctccagcccatcctaccctgcatactaccccaacaatgctaagtgtgtttgggaaatagaagtgaattctggttatcgcataaacctgggcttcagtaatctgaaattggaggcacaccataactgcagttttgattatgttgaaatctttgatggatcattgaatagcagtctcctgctggggaaaatctgtaatgataccaggcaaatatttacatcttcttacaaccgaatgaccattcactttcgaagtgacatcagtttccaaaacactggctttttggcttggtataactccttcccaagcgatgccaccttgaggttggtcaatttaaattcatcctatggtctatgtgccgggcgtgtagaaatttaccatggtggcacctgggggacagtttgtgatgactcctggaccattcaggaagctgaggtggtctgcagacagctagggtgtggacgtgcagtttcagcccttggaaatgcatattttggctctggctctggccccatcaccctggacgatgtagagtgctcagggacggaatccactctctggcagtgccggaaccgaggctggttctcccacaactgtaatcatcgtgaagatgctggtgtcatctgctcaggaaaccatctatcgacacctgctccttttctcaacatcacccgtccaaacacagattattcctgcggaggcttcctatcccaaccatcaggggacttttccagcccattctatcccgggaactatccaaacaatgccaagtgtgtgtgggacattgaggtgcaaaacaactaccgtgtgactgtgatcttcagagatgtccagcttgaaggtggctgcaactatgattatattgaagttttcgatggcccctaccgcagttcccctctcattgctcgagtttgtgatggggccagaggctccttcacttcttcctccaacttcatgtccattcgcttcatcagtgaccacagcatcacaaggagagggttccgggctgagtactactccagtccctccaatgacagcaccaacctgctctgtctgccaaatcacatgcaagccagtgtgagcaggagctatctccaatccttgggcttttctgccagtgaccttgtcatttccacctggaatggatactacgagtgtcggccccagataacgccgaacctggtgatattcacaattccctactcaggctgcggcaccttcaagcaggcagacaatgacaccatcgactattccaacttcctcacagcagctgtctcaggtggcatcatcaagaggaggacagacctccgtattcacgtcagctgcagaatgcttcagaacacctgggtcgacaccatgtacattgctaatgacaccatccacgttgctaataacaccatccaggtcgaggaagtccagtatggcaattttgacgtgaacatttccttttatacttcctcatctttcttgtatcctgtgaccagccgcccttactacgtggacctgaaccaggacttgtacgttcaggctgaaatcctccattctgatgctgtactgaccttgtttgtggacacctgcgtggcatcaccatactccaatgacttcacgtctttgacttatgatctaatccggagtggatgcgtgagggatgacacctacggaccctactcctcgccatctcttcgcattgcccgcttccggttcagggccttccacttcctgaaccgcttcccctccgtgtacctgcgttgtaaaatggtggtgtgcagagcgtatgacccctcttcccgctgctaccgaggctgtgtgttgaggtcgaagagggatgtgggctcctaccaggaaaaggtggacgtcgtcctgggtcccatccagctgcagacccccccacgccgagaagaggagcctcggtaggtggtcgctctcagaccccactgtccaccggggcgcagacccctgactcggggacttgggatgttcctcttggtgtcatattccaactcagattgagccctacattgtgctgcacctggtcatacggagttgaatcagacctggttcccgcctcccccaaggctcatggtccttggaggacccgttgcagggcgaggtcaagagagttctgacctggatggcccatagacctgacgtcccagaatccatgcttctcatctgcaaaatgaaaatgtcaatacttacttcttagcactgttgagagggttacttacataaaggaattttggtgaaactgc

SEQ ID NO: 1082 - DNA, 7656 bp, Homo sapiens
tttatagcagcagcagaaatataccaccctagaggacacacctccttttagctaggtacctataaatgtccaggattttctattcaattgagaagaacccagcaaaatggggatctccacagtcatccttgaaatgtgtcttttatggggacaagttctatctacaggtgggtggatcccaaggactacagactacgcttcactgattccctcggaggtgcccttggatacaactgtagcagaaggttctccatttccctcggagttgaccctggagtcaactgcagcagaaggttctccgatttccttggagtcaaccctggagtcaactgtagcagaaggttctctgattccctcagagtcaaccctggagtcaactgtagcagaaggatctgattctggtttggccctgaggctggtgaatggagatggcaggtgtcagggccgagtggagatcctataccgaggctcctggggcaccgtgtgtgatgacagctgggacaccaatgatgccaacgtggtctgtaggcagctgggttgtggctgggccatgtcagctccaggaaatgcctggtttggccagggctcaggacccattgccctggatgatgtgcgctgctcaggacacgaatcctacctgtggagctgcccccacaatggctggctctcccataactgtggccatggtgaagatgctggtgttatctgctcagctgcccagcctcagtcaacactcaggccagaaagttggcctgtcaggatatcaccacctgtacccacagaaggatctgaatccagtttggccctgaggctggtgaatggaggcgacaggtgtcgaggccgagtggaggtcctataccgaggctcctggggcaccgtgtgtgatgactactgggacaccaatgatgccaatgtggtctgcaggcagctgggctgtggctgggccatgtcagccccaggaaatgcccagtttggccagggctcaggacccattgtcctggatgatgtgcgctgctcaggacacgagtcctacctgtggagctgcccccacaatggctggctcacccacaactgtggccatagtgaagacgctggtgtcatctgctcagctcccctgtcccggccgacacccagcccagatacttggccgacctcacatgcatcaacagcaggacctgaatccagtttggccctgaggctggtgaatggaggtgacaggtgtcagggccgagtggaggtcctataccgaggctcctggggcaccgtgtgtgatgatagctgggacaccagtgacgccaatgtggtctgccggcagctgggctgtggctgggccacgtcagccccaggaaatgcccggtttggccagggttcaggacccattgtcctggatgacgtgcgctgctcaggctatgagtcctacctgtggagctgcccccacaatggctggctctcccataactgtcagcacagtgaagacgctggtgtcatctgctcagacacgttgccgaccatcaccttacctgcatcgacagtaggatctgaatccagtttggccctgaggctggtgaatggaggtgacaggtgtcagggccgagtggaggtcctataccgaggctcctggggcaccgtgtgtgatgacagctgggacaccaatgatgccaatgtggtctgcaggcagctgggctgtggctgggccatgttggccccaggaaatgcccggtttggtcagggctcaggacccattgtcctggatgacgtgcgctgctcagggaatgagtcctacttgtggagctgcccccacaatggctggctctcccataactgtggccatagtgaagacgctggtgtcatctgctcaggacctgaatccagtttggccctggggctggtgaatggaggtgacaggtgtcagggccgagtggaggtcctataccgaggctcttggggcaccgtgtgtgatgacagctgggacaccaatgatgccaatgtggtctgcaggcagctgggctgtggctgggccacgtcagccccaggaaatgcccggtttggtcagggctcaggacccattgtcctggatgatgtgcgctgctcaggacatgagtcctacctgtggagctgccccaacaatggctggctctcccacaactgtggccatcatgaagatgctggtgtcatctgctcagctgcccagtcccggtcgacgcccaggccagacacgttgtcgaccatcacgttacctccatcgacagtaggatctgaatccagtttgaccctgaggctggtgaatggaagtgacaggtgtcagggccgagtagaggtcctataccgaggctcctggggcaccgtgtgtgatgacagctgggataccaatgatgccaatgtggtctgcaggcagctgggctgtggctgggccacgtcggccccaggaaatgcccggtttggccagggctcaggacccattgttctggatgatgtgcgctgctcaggacacgagtcctacctgtggagctgcccccacaatggctggctctcccacaactgtggccatcatgaagatgctggtgtcatctgctcagtttcccagtcccggccgacacccagtccagatacttggccgacctcacatgcatcaacagcaggatctgaatccagtttggccctgaggctggtgaatggaggtgacaggtgtcagggccgagtggaggtcctataccgaggctcctggggcaccgtgtgtgatgatagctgggacaccagtgacgccaatgtggtctgccggcggctgggctgtggctgggccacgtcagccccaggaaatgcccggtttggccagggttcaggacccattgtcctggatgacgtgcgctgctcaggctatgagtcctacctgtggagctgcccccacaatggctggctctcccataactgtcagcacagtgaagacgctggtgtcatctgctcagctgcccactcctggtcgacgcccagtccagacacattgccgaccatcaccttgcctgcatcgacagtaggatctgaatccagtttggccctgaggctggtgaatggaggtgacaggtgtcagggccgagtggaggtcctataccaaggctcctggggcaccgtgtgcgatgacagctgggacaccaatgatgccaatgtcgtctgcaggcaactgggctgtggctgggccatgtcagccccaggaaatgcccggtttggtcagggctcaggacccattgtcctggatgatgtgcgctgctcaggacacgagtcttacctgtggagctgcccccacaatggctggctctcccacaactgtggccatagtgaagacgctggtgtcatctgctcagcttcccagtcccggccaacacctagtccagacacttggccaacctcacatgcatcaacagcaggatctgaatccagtttggccctgaggctggtgaatggaggtgacaggtgtcagggccgagtggaggtcctataccgaggctcctggggcaccgtgtgtgatgactactgggacaccaatgatgccaatgtggtttgcaggcagctgggctgtggctgggccatgtcagccccaggaaatgcccggtttggccagggttcaggacccattgtcctggatgatgtgcgctgctcaggacatgagtcctatctgtggagttgcccccacgatggctggctctcccacaactgtggccatcatgaagacgctggtgtcatctgctcagcttcccagtcccagccgacacccagcccagacacttggccaacctcacatgcatcaacagcaggatctgaatccagtttggccctgaggctggtgaatggaggtgacaggtgtcagggccgagtggaggtcctataccgaggcccctggggcaccgtgtgtgatgactactgggacaccaatgatgccaatgtggtttgcaggcagctgggctgtggctgggccacgtcagccccaggaaatgcccggtttggccagggttcaggacccattgtcctggatgatgtgcgctgctcaggacatgagtcctatctgtggagctgcccccacaatggctggctctcccacaactgtggccatcatgaagacgctggtgtcatctgctcagcttcccagtcccagccgacacccagcccagacacttggccaacctcgcatgcatcaacagcaggatctgaatccagtttggccctgaggctggtgaatggaggtgacaggtgtcagggccgagtggaggtcctataccgaggctcctggggcaccgtgtgtgatgactactgggacaccaatgatgccaatgtggtttgcaggcagctgggctgtggctgggccacgtcagccccaggaagtgcccggtttggccagggttcaggacccattgccctggatgatgtgcgctgctcaggacatgagtcctatctgtggagctgcccccacaatggctggctctcccacaactgtggccatcatgaagacgctggtgtcatctgctcagcttcccagtcccagccgacacccagcccagacacttggccaacctctcgtgcatcaacagcaggatctgaatccactttggccctgagactggtgaatggaggtgacaggtgtcgaggccgagtggaggtcctataccaaggctcctggggcaccgtgtgtgatgactactgggacaccaatgatgccaacgtggtctgcaggcagctgggctgtggctgggccatgtcagccccaggaaatgcccagtttggccagggctcaggacccattgtcctggatgatgtgcgctgctcaggacacgagtcttacctgtggagctgcccccacaatggctggctctcccacaactgtggccatcatgaagatgctggtgtcatctgctcagctgctcagtcccagtcaacgcccaggccagatacttggctgaccaccaacttaccggcattgacagtaggatctgaatccagtttggctctgaggctggtgaatggaggtgacaggtgtcgaggccgagtggaggtcctgtatcgaggctcctggggaaccgtgtgtgatgacagctgggacaccaatgatgccaatgtggtctgcaggcagctgggctgtggctgggccatgtcggccccaggaaatgcccggtttggccagggctcaggacccattgtcctggatgatgtgcgctgctcagggaatgagtcctacctgtggagctgcccccacaaaggctggctcacccacaactgtggccatcacgaagacgctggtgtcatctgctcagccacccaaataaattctactacgacagattggtggcatccaacaactacaaccactgcaagaccctcttcaaattgtggtggcttcttattctatgccagtgggacattctccagcccatcctaccctgcatactaccccaacaatgctaagtgtgtttgggaaatagaagtgaattctggttatcgcataaacctgggcttcagtaatctgaaattggaggcacaccataactgcagttttgattatgttgaaatctttgatggatcattgaatagcagtctcctgctggggaaaatctgtaatgataccaggcaaatatttacatcttcttacaaccgaatgaccattcactttcgaagtgacatcagtttccaaaacactggctttttggcttggtataactccttcccaagcgatgccaccttgaggttggtcaatttaaattcatcctatggtctatgtgccgggcgtgtagaaatttaccatggtggcacctgggggacagtttgtgatgactcctggaccattcaggaagctgaggtggtctgcagacagctagggtgtggacgtgcagtttcagcccttggaaatgcatattttggctctggctctggccccatcaccctggacgatgtagagtgctcagggacggaatccactctctggcagtgccggaaccgaggctggttctcccacaactgtaatcatcgtgaagatgctggtgtcatctgctcaggaaaccatctatcgacacctgctccttttctcaacatcacccgtccaaacacagattattcctgcggaggcttcctatcccaaccatcaggggacttttccagcccattctatcccgggaactatccaaacaatgccaagtgtgtgtgggacattgaggtgcaaaacaactaccgtgtgactgtgatcttcagagatgtccagcttgaaggtggctgcaactatgattatattgaagttttcgatggcccctaccgcagttcccctctcattgctcgagtttgtgatggggccagaggctccttcacttcttcctccaacttcatgtccattcgcttcatcagtgaccacagcatcacaaggagagggttccgggctgagtactactccagtccctccaatgacagcaccaacctgctctgtctgccaaatcacatgcaagccagtgtgagcaggagctatctccaatccttgggcttttctgccagtgaccttgtcatttccacctggaatggatactacgagtgtcggccccagataacgccgaacctggtgatattcacaattccctactcaggctgcggcaccttcaagcaggcagacaatgacaccatcgactattccaacttcctcacagcagctgtctcaggtggcatcatcaagaggaggacagacctccgtattcacgtcagctgcagaatgcttcagaacacctgggtcgacaccatgtacattgctaatgacaccatccacgttgctaataacaccatccaggtcgaggaagtccagtatggcaattttgacgtgaacatttccttttatacttcctcatctttcttgtatcctgtgaccagccgcccttactacgtggacctgaaccaggacttgtacgttcaggctgaaatcctccattctgatgctgtactgaccttgtttgtggacacctgcgtggcatcaccatactccaatgacttcacgtctttgacttatgatctaatccggagtggatgcgtgagggatgacacctacggaccctactcctcgccatctcttcgcattgcccgcttccggttcagggccttccacttcctgaaccgcttcccctccgtgtacctgcgttgtaaaatggtggtgtgcagagcgtatgacccctcttcccgctgctaccgaggctgtgtgttgaggtcgaagagggatgtgggctcctaccaggaaaaggtggacgtcgtcctgggtcccatccagctgcagacccccccacgccgagaagaggagcctcggtaggtggtcgctctcagaccccactgtccaccggggcgcagacccctgactcggggacttgggatgttcctcttggtgtcatattccaactcagattgagccctacattgtgctgcacctggtcatacggagttgaatcagacctggttcccgcctcccccaaggctcatggtccttggaggacccgttgcagggtgaggtcaagagagttctgacctggatggcccatagacctgacgtcccagaatccatgcttctcatctgcaaaatgaaaatgtcaatacttacttcttagcactgttgagagggttacttacataaaggaattttggtgaaactgc

SEQ ID NO: 1083 - DNA, 5428 bp, Homo sapiens
tttatagcagcagcagaaatataccaccctagaggacacacctccttttagctaggtacctataaatgtccaggattttctattcaattgagaagaacccagcaaaatggggatctccacagtcatccttgaaatgtgtcttttatggggacaagttctatctacaggtgggtggatcccaaggactacagactacgcttcactgattccctcggaggtgcccttggatacaactgtagcagaaggttctccatttccctcggagttgaccctggagtcaactgtagcagaaggttctccgatttccttggagtcaaccctggagtcaactgtagcagaaggttctctgattccctcagagtcaaccctggagtcaactgtagcagaaggatctgattctggtttggccctgaggctggtgaatggagatggcaggtgtcagggccgagtggagatcctataccgaggctcctggggcaccgtgtgtgatgacagctgggacaccaatgatgccaacgtggtctgtaggcagctgggttgtggctgggccatgtcagctccaggaaatgcctggtttggccagggctcaggacccattgccctggatgatgtgcgctgctcaggacacgaatcctacctgtggagctgcccccacaatggctggctctcccataactgtggccatggtgaagatgctggtgttatctgctcagctgcccagcctcagtcaacactcaggccagaaagttggcctgtcaggatatcaccacctgtacccacagaaggatctgaatccagtttggccctgaggctggtgaatggaggcgacaggtgtcgaggccgagtggaggtcctataccgaggctcctggggcaccgtgtgtgatgactactgggacaccaatgatgccaatgtggtctgcaggcagctgggctgtggctgggccatgtcagccccaggaaatgcccagtttggccagggctcaggacccattgtcctggatgatgtgcgctgctcaggacacgagtcctacctgtggagctgcccccacaatggctggctcacccacaactgtggccatagtgaagacgctggtgtcatctgctcagctccccagtcccggccgacacccagcccagatacttggccgacctcacatgcatcaacagcaggatctgaatccagtttggccctgaggctggtgaatggaggtgacaggtgtcagggccgagtggaggtcctataccgaggctcctggggcaccgtgtgtgatgatagctgggacaccagtgacgccaatgtggtctgccggcagctgggctgtggctgggccacgtcagccccaggaaatgcccggtttggccagggttcaggacccattgtcctggatgacgtgcgctgctcaggctatgagtcctacctgtggagctgcccccacaatggctggctctcccataactgtcagcacagtgaagacgctggtgtcatctgctcagctgcccactcctggtcgacgcccagtccagacacattgccgaccatcaccttgcctgcatcgacagtaggatctgaatccagtttggccctgaggctggtgaatggaggtgacaggtgtcagggccgagtggaggtcctataccaaggctcctggggcaccgtgtgcgatgacagctgggacaccaatgatgccaatgtcgtctgcaggcaactgggctgtggctgggccatgtcagccccaggaaatgcccggtttggtcagggctcaggacccattgtcctggatgatgtgcgctgctcaggacacgagtcttacctgtggagctgcccccacaatggctggctctcccacaactgtggccatagtgaagacgctggtgtcatctgctcagcttcccagtcccggccaacacctagtccagacacttggccaacctcacatgcatcaacagcaggaggatctgaatccagtttggccctgaggctggtgaatggaggtgacaggtgtcagggccgagtggaggtcctataccgaggctcctggggcaccgtgtgtgatgactactgggacaccaatgatgccaatgtggtttgcaggcagctgggctgtggctgggccacgtcagccccaggaaatgcccggtttggccagggttcaggacccattgtcctggatgatgtgcgctgctcaggacatgagtcctatctgtggagctgcccccacaatggctggctctcccacaactgtggccatcatgaagacgctggtgtcatctgctcagcttcccagtcccagccgacacccagcccagacacttggccaacctctcgtgcatcaacagcaggatctgaatccactttggccctgagactggtgaatggaggtgacaggtgtcgaggccgagtggaggtcctataccaaggctcctggggcaccgtgtgtgatgactactgggacaccaatgatgccaacgtggtctgcaggcagctgggctgtggctgggccatgtcagccccaggaaatgcccagtttggccagggctcaggacccattgtcctggatgatgtgcgctgctcaggacacgagtcttacctgtggagctgcccccacaatggctggctctcccacaactgtggccatcatgaagatgctggtgtcatctgctcagctgctcagtcccagtcaacgcccaggccagatacttggctgaccaccaacttaccggcattgacagtaggatctgaatccagtttggctctgaggctggtgaatggaggtgacaggtgtcgaggccgagtggaggtcctgtatcgaggctcctggggaaccgtgtgtgatgacagctgggacaccaatgatgccaatgtggtctgcaggcagctgggctgtggctgggccatgtcggccccaggaaatgcccggtttggccagggctcaggacccattgtcctggatgatgtgcgctgctcagggaatgagtcctacctgtggagctgcccccacaaaggctggctcacccacaactgtggccatcacgaagacgctggtgtcatctgctcagccacccaaataaattctactacgacagattggtggcatccaacaactacaaccactgcaagaccctcttcaaattgtggtggcttcttattctatgccagtgggacattctccagcccatcctaccctgcatactaccccaacaatgctaagtgtgtttgggaaatagaagtgaattctggttatcgcataaacctgggcttcagtaatctgaaattggaggcacaccataactgcagttttgattatgttgaaatctttgatggatcattgaatagcagtctcctgctggggaaaatctgtaatgataccaggcaaatatttacatcttcttacaaccgaatgaccattcactttcgaagtgacatcagtttccaaaacactggctttttggcttggtataactccttcccaagcgatgccaccttgaggttggtcaatttaaattcatcctatggtctatgtgccgggcgtgtagaaatttaccatggtggcacctgggggacagtttgtgatgactcctggaccattcaggaagctgaggtggtctgcagacagctagggtgtggacgtgcagtttcagcccttggaaatgcatattttggctctggctctggccccatcaccctggacgatgtagagtgctcagggacggaatccactctctggcagtgccggaaccgaggctggttctcccacaactgtaatcatcgtgaagatgctggtgtcatctgctcaggaaaccatctatcgacacctgctccttttctcaacatcacccgtccaaacacagattattcctgcggaggcttcctatcccaaccatcaggggacttttccagcccattctatcccgggaactatccaaacaatgccaagtgtgtgtgggacattgaggtgcaaaacaactaccgtgtgactgtgatcttcagagatgtccagcttgaaggtggctgcaactatgattatattgaagttttcgatggcccctaccgcagttcccctctcattgctcgagtttgtgatggggccagaggctccttcacttcttcctccaacttcatgtccattcgcttcatcagtgaccacagcatcacaaggagagggttccgggctgagtactactccagtccctccaatgacagcaccaacctgctctgtctgccaaatcacatgcaagccagtgtgagcaggagctatctccaatccttgggcttttctgccagtgaccttgtcatttccacctggaatggatactacgagtgtcggccccagataacgccgaacctggtgatattcacaattccctactcaggctgcggcaccttcaagcaggcagacaatgacaccatcgactattccaacttcctcacagcagctgtctcaggtggcatcatcaagaggaggacagacctccgtattcacgtcagctgcagaatgcttcagaacacctgggtcgacaccatgtacattgctaatgacaccatccacgttgctaataacaccatccaggtcgaggaagtccagtatggcaattttgacgtgaacatttccttttatacttcctcatctttcttgtatcctgtgaccagccgcccttactacgtggacctgaaccaggacttgtacgttcaggctgaaatcctccattctgatgctgtactgaccttgtttgtggacacctgcgtggcatcaccatactccaatgacttcacgtctttgacttatgatctaatccggagtggatgcgtgagggatgacacctacggaccctactcctcgccatctcttcgcattgcccgcttccggttcagggccttccacttcctgaaccgcttcccctccgtgtacctgcgttgtaaaatggtggtgtgcagagcgtatgacccctcttcccgctgctaccgaggctgtgtgttgaggtcgaagagggatgtgggctcctaccaggaaaaggtggacgtcgtcctgggtcccatccagctgcagacccccccacgccgagaagaggagcctcggtaggtggtcgctctcagaccccactgtccaccggggcgcagacccctgactcggggacttgggatgttcctcttggtgtcatattccaactcagattgagccctacattgtgctgcacctggtcatacggagttgaatcagacctggttcccgcctcccccaaggctcatggtccttggaggacccgttgcagggcgaggtcaagagagttctgacctggatggcccatagacctgacgtcccagaatccatgcttctcatctgcaaaatgaaaatgtcaatacttacttcttagcactgttgagagggttacttacataaaggaattttggtgaaactgcctcagcctgt

SEQ ID NO: 1084 - DNA, 7686 bp, Homo sapiens
tttatagcagcagcagaaatataccaccctagaggacacacctccttttagctaggtacctataaatgtccaggattttctattcaattgagaagaacccagcaaaatggggatctccacagtcatccttgaaatgtgtcttttatggggacaagttctatctacaggtgggtggatcccaaggactacagactacgcttcactgattccctcggaggtgcccttggatcaaactgtagcagaaggttctccatttccctcggagtcgaccctggagtcaactgcagcagaaggttctccgatttccttggagtcaaccctggagtcaactgtagcagaaggttctctgattccctcagagtcaaccctggagtcaactgtagcagaaggatctgattctggtttggccctgaggctggtgaatggagatggcaggtgtcagggccgagtggagatcctataccgaggctcctggggcaccgtgtgtgatgacagctgggacaccaatgatgccaacgtggtctgtaggcagctgggttgtggctgggccatgtcagctccaggaaatgcctggtttggccagggctcaggacccattgccctggatgatgtgcgctgctcaggacacgaatcctacctgtggagctgcccccacaatggctggctctcccataactgtggccatggtgaagatgctggtgttatctgctcagctgcccagcctcagtcaacactcaggccagaaagttggcctgtcaggatatcaccacctgtacccacagaaggatctgaatccagtttggccctgaggctggtgaatggaggcgacaggtgtcgaggccgagtggaggtcctataccgaggctcctggggcaccgtgtgtgatgactactgggacaccaatgatgccaatgtggtctgcaggcagctgggctgtggctgggccatgtcagccccaggaaatgcccagtttggccagggctcaggacccattgtcctggatgatgtgcgctgctcaggacacgagtcctacctgtggagctgcccccacaatggctggctcacccacaactgtggccatagtgaagacgctggtgtcatctgctcagctccccagtcccggccgacacccagcccagatacttggccgacctcacatgcatcaacagcaggacctgaatccagtttggccctgaggctggtgaatggaggtgacaggtgtcagggccgagtggaggtcctataccgaggctcctggggcaccgtgtgtgatgatagctgggacaccagtgacgccaatgtggtctgccggcagctgggctgtggctgggccacgtcagccccaggaaatgcccggtttggccagggttcaggacccattgtcctggatgacgtgcgctgctcaggctatgagtcctacctgtggagctgcccccacaatggctggctctcccataactgtcagcacagtgaagacgctggtgtcatctgctcagctgcccactcctggtcgacgcccagtccagacacgttgccgaccatcaccttacctgcatcgacagtaggatctgaatccagtttggccctgaggctggtgaatggaggtgacaggtgtcagggccgagtggaggtcctataccgaggctcctggggcaccgtgtgtgatgacagctgggacaccaatgatgccaatgtggtctgcaggcagctgggctgtggctgggccatgttggccccaggaaatgcccggtttggtcagggctcaggacccattgtcctggatgacgtgcgctgctcagggaatgagtcctacttgtggagctgcccccacaatggctggctctcccataactgtggccatagtgaagacgctggtgtcatctgctcaggacctgaatccagtttggccctgaggctggtgaatggaggtgacaggtgtcagggccgagtggaggtcctataccgaggctcttggggcaccgtgtgtgatgacagctgggacaccaatgatgccaatgtggtctgcaggcagctgggctgtggctgggccatgtcagccccaggaaatgcccggtttggtcagggctcaggacccattgtcctggatgatgtgcgctgctcaggacatgagtcctacctgtggagctgccccaacaatggctggctctcccacaactgtggccatcatgaagatgctggtgtcatctgctcagctgcccagtcccggtcgacgcccaggccagacacgttgtcgaccatcacgttacctccatcgacagtaggatctgaatccagtttgaccctgaggctggtgaatggaagtgacaggtgtcagggccgagtagaggtcctataccgaggctcctggggcaccgtgtgtgatgacagctgggataccaatgatgccaatgtggtctgcaggcagctgggctgtggctgggccatgtcagccccaggaaatgcccggtttggccagggctcaggacccattgttctggatgatgtgcgctgctcaggacacgagtcctacctgtggagctgcccccacaatggctggctctcccacaactgtggccatcatgaagatgctggtgtcatctgctcagtttcccagtcccggccgacacccagtccagatacttggccgacctcacatgcatcaacagcaggatctgaatccagtttggccctgaggctggtgaatggaggtgacaggtgtcagggccgagtggaggtcctataccgaggctcctggggcaccgtgtgtgatgatagctgggacaccagtgacgccaatgtggtctgccggcagctgggctgtggctgggccacgtcagccccaggaaatgcccggtttggccagggttcaggacccattgtcctggatgacgtgcgctgctcaggctatgagtcctacctgtggagctgcccccacaatggctggctctcccataactgtcagcacagtgaagacgctggtgtcatctgctcagctgcccactcctggtcgacgcccagtccagacacattgccgaccatcaccttgcctgcatcgacagtaggatctgaatccagtttggccctgaggctggtgaatggaggtgacaggtgtcagggccgagtggaggtcctataccaaggctcctggggcaccgtgtgcgatgacagctgggacaccaatgatgccaatgtcgtctgcaggcaaccgggctgtggctgggccatgtcagccccaggaaatgcccggtttggtcagggctcaggacccattgtcctggatgatgtgcgctgctcaggacacgagtcttacccgtggagctgcccccacaatggctggctctcccacaactgtggccatagtgaagacgctggtgtcatctgctcagcttcccagtcccggccaacacctagtccagacacttggccaacctcacatgcatcaacagcaggatctgaatccagtttggccctgaggctggtgaatggaggtgacaggtgtcagggccgagtggaggtcctataccgaggctcctggggcaccgtgtgtgatgactactgggacaccaatgatgccaatgtggtttgcaggcagctgggctgtggctgggccatgtcagccccaggaaatgcccggtttggccagggttcaggacccattgtcctggatgatgtgcgctgctcaggacatgagtcctatctgtggagctgcccccacaatggctggctctcccacaactgtggccatcatgaagacgctggtgtcatctgctcagcttcccagtcccagccgacacccagcccagacacttggccaacctcacatgcatcaacagcaggatctgaatccagtttggccctgaggctggtgaatggaggtgacaggtgtcagggccgagtggaggtcctataccgaggctcctggggcaccgtgtgtgatgactactgggacaccaatgatgccaatgtggtttgcaggcagctgggctgtggctgggccacgtcagccccaggaaatgcccggtttggccagggttcaggacccattgtcctggatgatgtgcgctgctcaggacatgagtcctatctgtggagctgcccccacaatggctggctctcccacaactgtggccatcatgaagacgctggtgtcatctgctcagcttcccagtcccagccgacacccagcccagacacttggccaacctcacatgcatcaacagcaggatctgaatccagtttggccctgaggctggtgaatggaggtgacaggtgtcagggccgagtggaggtcctataccgaggctcctggggcaccgtgtgtgatgactactgggacaccaatgatgccaatgtggtttgcaggcagctgggctgtggctgggccacgtcagccccaggaaatgcccggtttggccagggttcaggacccattgtcctggatgatgtgcgctgctcaggacatgagtcctatctgtggagctgcccccacaatggctggctctcccacaactgtggccatcatgaagacgctggtgtcatctgctcagcttcccagtcccagccgacacccagcccagacacttggccaacctctcgtgcatcaacagcaggatctgaatccactttggccctgagactggtgaatggaggtgacaggtgtcgaggccgagtggaggtcctataccaaggctcctggggcaccgtgtgtgatgactactgggacaccaatgatgccaacgtggtctgcaggcagctgggctgtggctgggccatgtcagccccaggaaatgcccagtttggccagggctcaggacccattgtcctggatgatgtgcgctgctcaggacacgagtcttacctgtggagctgcccccacaatggctggctctcccacaactgtggccatcatgaagatgctggtgtcatctgctcagctgctcagtcccagtcaacgcccaggccagatacttggctgaccaccaacttaccggcattgacagtaggatctgaatccagtttggctctgaggctggtgaatggaggtgacaggtgtcgaggccgagtggaggtcctgtatcgaggctcctggggaaccgtgtgtgatgacagctgggacaccaatgatgccaatgtggtctgcaggcagctgggctgtggctgggccatgtcggccccaggaaatgcccggtttggccagggctcaggacccattgtcctggatgatgtgcgctgctcagggaatgagtcctacctgtggagctgcccccacaaaggctggctcacccacaactgtggccatcacgaagacgctggtgtcatctgctcagccacccaaataaattctactacgacagattggtggcatccaacaactacaaccactgcaagaccctcttcaaattgtggtggcttcttattctatgccagtgggacattctccagcccatcctaccctgcatactaccccaacaatgctaagtgtgtttgggaaatagaagtgaattctggttatcgcataaacctgggcttcagtaatctgaaattggaggcacaccataactgcagttttgattatgttgaaatctttgatggatcattgaatagcagtctcctgctggggaaaatctgtaatgataccaggcaaatatttacatcttcttacaaccgaatgaccattcactttcgaagtgacatcagtttccaaaacactggctttttggcttggtataactccttcccaagcgatgccaccttgaggttggtcaatttaaattcatcctatggtctatgtgccgggcgtgtagaaatttaccatggtggcacctgggggacagtttgtgatgactcctggaccattcaggaagctgaggtggtctgcagacagctagggtgtggacgtgcagtttcagcccttggaaatgcatattttggctctggctctggccccatcaccctggacgatgtagagtgctcagggacggaatccactctctggcagtgccggaaccgaggctggttctcccacaactgtaatcatcgtgaagatgctggtgtcatctgctcaggaaaccatctatcgacacctgctccttttctcaacatcacccgtccaaacacagattattcctgcggaggcttcctatcccaaccatcaggggacttttccagcccattctatcccgggaactatccaaacaatgccaagtgtgtgtgggacattgaggtgcaaaacaactaccgtgtgactgtgatcttcagagatgtccagcttgaaggtggctgcaactatgattatattgaagttttcgatggcccctaccgcagttcccctctcattgctcgagtttgtgatggggccagaggctccttcacttcttcctccaacttcatgtccattcgcttcatcagtgaccacagcatcacaaggagagggttccgggctgagtactactccagtccctccaatgacagcaccaacctgctctgtctgccaaatcacatgcaagccagtgtgagcaggagctatctccaatccttgggcttttctgccagtgaccttgtcatttccacctggaatggatactacgagtgtcggccccagataacgccgaacctggtgatattcacaattccctactcaggctgcggcaccttcaagcaggcagacaatgacaccatcgactattccaacttcctcacagcagctgtctcaggtggcatcatcaagaggaggacagacctccgtattcacgtcagctgcagaatgcttcagaacacctgggtcgacaccatgtacattgctaatgacaccatccacgttgctaataacaccatccaggtcgaggaagtccagtatggcaattttgacgtgaacatttccttttatacttcctcatctttcttgtatcctgtgaccagccgcccttactacgtggacctgaaccaggacttgtacgttcaggctgaaatcctccattctgatgctgtactgaccttgtttgtggacacctgcgtggcatcaccatactccaatgacttcacgtctttgacttatgatctaatccggagtggatgcgtgagggatgacacctacggaccctactcctcgccgtctcttcgcattgcccgcttccggttcagggccttccacttcctgaaccgcttcccctccgtgtacctgcgttgtaaaatggtggtgtgcagagcgtatgacccctcttcccgctgctaccgaggctgtgtgttgaggtcgaagagggatgtgggctcctaccaggaaaaggtggacgtcgtcctgggtcccatccagctgcagacccccccacgccgagaagaggagcctcggtaggtggtcgctctcagaccccactgtccaccggggcgcagacccctgactcggggacttgggatgttcctcttggtgtcatattccaactcagattgagccctacattgtgctgcacctggtcatacggagttgaatcagacctggttcccgcctcccccaaggctcatggtccttggaggacccgttgcagggcgaggtcaagagagttctgacctggatggcccatagacctgacgtcccagaatccatgcttctcatctgcaaaatgaaaatgtcaatacttacttcttagcactgttgagagggttacttacataaaggaattttggtgaaactgc

SEQ ID NO: 1085 - DNA, 5474 bp, Homo sapiens
tttatagcagcagcagaaatataccaccctagaggacacacctccttttagctaggtacctataaatgtccaggattttctattcaattgagaagaacccagcaaaatggggatctccacagtcatccttgaaatgtgtcttttatggggacaagttctatctacaggtgggtggatcccaaggactacagactacgcttcactgattccctcggaggtgcccttggatacaactgtagcagaaggttctccatttccctcggagttgaccctggagtcaactgtagcagaaggttctccgatttccttggagtcaaccctggagtcaactgtagcagaaggttctctgattccctcagagtcaaccctggagtcaactgtagcagaaggatctgattctggtttggccctgaggctggtgaatggagatggcaggtgtcagggccgagtggagatcctataccgaggctcctggggcaccgtgtgtgatgacagctgggacaccaatgatgccaacgtggtctgtaggcagctgggttgtggctgggccatgtcagctccaggaaatgcctggtttggccagggctcaggacccattgccctggatgatgtgcgctgctcaggacacgaatcctacctgtggagctgcccccacaatggctggctctcccataactgtggccatggtgaagatgctggtgttatctgctcagctgcccagcctcagtcaacactcaggccagaaagttggcctgtcaggatatcaccacctgtacccacagaaggatctgaatccagtttggccctgaggctggtgaatggaggcgacaggtgtcgaggccgagtggaggtcctataccgaggctcctggggcaccgtgtgtgatgactactgggacaccaatgatgccaatgtggtctgcaggcagctgggctgtggctgggccatgtcagccccaggaaatgcccagtttggccagggctcaggacccattgtcctggatgatgtgcgctgctcaggacacgagtcctacctgtggagctgcccccacaatggctggctcacccacaactgtggccatagtgaagacgctggtgtcatctgctcagctccccagtcccggccgacacccagcccagatacttggccgacctcacatgcatcaacagcaggatctgaatccagtttggccctgaggctggtgaatggaggtgacaggtgtcagggccgagtggaggtcctataccgaggctcctggggcaccgtgtgtgatgatagctgggacaccagtgacgccaatgtggtctgccggcagctgggctgtggctgggccacgtcagccccaggaaatgcccggtttggccagggttcaggacccattgtcctggatgacgtgcgctgctcaggctatgagtcctacctgtggagctgcccccacaatggctggctctcccataactgtcagcacagtgaagacgctggtgtcatctgctcagctgcccactcctggtcgacgcccagtccagacacattgccgaccatcaccttgcctgcatcgacagtaggatctgaatccagtttggccctgaggctggtgaatggaggtgacaggtgtcagggccgagtggaggtcctataccaaggctcctggggcaccgtgtgcgatgacagctgggacaccaatgatgccaatgtcgtctgcaggcaactgggctgtggctgggccatgtcagccccaggaaatgcccggtttggtcagggctcaggacccattgtcctggatgatgtgcgctgctcaggacacgagtcttacctgtggagctgcccccacaatggctggctctcccacaactgtggccatagtgaagacgctggtgtcatctgctcaggatctgaatccagtttggccctgaggctggtgaatggaggtgacaggtgtcagggccgagtggaggtcctataccgaggctcctggggcaccgtgtgtgatgactactgggacaccaatgatgccaatgtggtttgcaggcagctgggctgtggctgggccacgtcagccccaggaaatgcccggtttggccagggttcaggacccattgtcctggatgatgtgcgctgctcaggacatgagtcctatctgtggagctgcccccacaatggctggctctcccacaactgtggccatcatgaagacgctggtgtcatctgctcaggatctgaatccactttggccctgagactggtgaatggaggtgacaggtgtcgaggccgagtggaggtcctataccaaggctcctggggcaccgtgtgtgatgactactgggacaccaatgatgccaacgtggtctgcaggcagctgggctgtggctgggccatgtcagccccaggaaatgcccagtttggccagggctcaggacccattgtcctggatgatgtgcgctgctcaggacacgagtcttacctgtggagctgcccccacaatggctggctctcccacaactgtggccatcatgaagatgctggtgtcatctgctcagctgctcagtcccagtcaacgcccaggccagatacttggctgaccaccaacttaccggcattgacagtaggatctgaatccagtttggctctgaggctggtgaatggaggtgacaggtgtcgaggccgagtggaggtcctgtatcgaggctcctggggaaccgtgtgtgatgacagctgggacaccaatgatgccaatgtggtctgcaggcagctgggctgtggctgggccatgtcggccccaggaaatgcccggtttggccagggctcaggacccattgtcctggatgatgtgcgctgctcagggaatgagtcctacctgtggagctgcccccacaaaggctggctcacccacaactgtggccatcacgaagacgctggtgtcatctgctcagaatccaattctggtttggccctgaggctggtgaatggaggtgaccagtgtcagggccaggtggaggtcctgtaccaagtctcctggggcaccgtgtatgatgacaccaatgacgccaatgtggtctgcaggcagctgggccgtggctgggccgtggcattcccaggaaatgcctgccacccaaataaattctactacgacagattggtggcatccaacaactacaaccactgcaagaccctcttcaaattgtggtggcttcttattctatgccagtgggacattctccagcccatcctaccctgcatactaccccaacaatgctaagtgtgtttgggaaatagaagtgaattctggttatcgcataaacctgggcttcagtaatctgaaattggaggcacaccataactgcagttttgattatgttgaaatctttgatggatcattgaatagcagtctcctgctggggaaaatctgtaatgataccaggcaaatatttacatcttcttacaaccgaatgaccattcactttcgaagtgacatcagtttccaaaacactggctttttggcttggtataactccttcccaagcgatgccaccttgaggttggtcaatttaaattcatcctatggtctatgtgccgggcgtgtagaaatttaccatggtggcacctgggggacagtttgtgatgactcctggaccattcaggaagctgaggtggtctgcagacagctagggtgtggacgtgcagtttcagcccttggaaatgcatattttggctctggctctggccccatcaccctggacgatgtagagtgctcagggacggaatccactctctggcagtgccggaaccgaggctggttctcccacaactgtaatcatcgtgaagatgctggtgtcatctgctcaggaaaccatctatcgacacctgctccttttctcaacatcacccgtccaaacacagattattcctgcggaggcttcctatcccaaccatcaggggacttttccagcccattctatcccgggaactatccaaacaatgccaagtgtgtgtgggacattgaggtgcaaaacaactaccgtgtgactgtgatcttcagagatgtccagcttgaaggtggctgcaactatgattatattgaagttttcgatggcccctaccgcagttcccctctcattgctcgagtttgtgatggggccagaggctccttcacttcttcctccaacttcatgtccattcgcttcatcagtgaccacagcatcacaaggagagggttccgggctgagtactactccagtccctccaatgacagcaccaacctgctctgtctgccaaatcacatgcaagccagtgtgagcaggagctatctccaatccttgggcttttctgccagtgaccttgtcatttccacctggaatggatactacgagtgtcggccccagataacgccgaacctggtgatattcacaattccctactcaggctgcggcaccttcaagcaggcagacaatgacaccatcgactattccaacttcctcacagcagctgtctcaggtggcatcatcaagaggaggacagacctccgtattcacgtcagctgcagaatgcttcagaacacctgggtcgacaccatgtacattgctaatgacaccatccacgttgctaataacaccatccaggtcgaggaagtccagtatggcaattttgacgtgaacatttccttttatacttcctcatctttcttgtatcctgtgaccagccgcccttactacgtggacctgaaccaggacttgtacgttcaggctgaaatcctccattctgatgctgtactgaccttgtttgtggacacctgcgtggcatcaccatactccaatgacttcacgtctttgacttatgatctaatccggagtggatgcgtgagggatgacacctacggaccctactcctcgccatctcttcgcattgcccgcttccggttcagggccttccacttcctgaaccgcttcccctccgtgtacctgcgttgtaaaatggtggtgtgcagagcgtatgacccctcttcccgctgctaccgaggctgtgtgttgaggtcgaagagggatgtgggctcctaccaggaaaaggtggacgtcgtcctgggtcccatccagctgcagacccccccacgccgagaagaggagcctcggtaggtggtcgctctcagaccccactgtccaccggggcgcagacccctgactcggggacttgggatgttcctcttggtgtcatattccaactcagattgagccctacattgtgctgcacctggtcatacggagttgaatcagacctggttcccgcctcccccaaggctcatggtccttggaggacccgttgcagggcgaggtcaagagagttctgacctggatggcccatagacctgacgtcccagaatccatgcttctcatctgcaaaatgaaaatgtcaatacttacttcttagcactgttgagagggttacttacataaaggaattttggtgaaactgcctcagcctgt

SEQ ID NO: 1086 - DNA, 3404 bp, Homo sapiens
tttctttggagaacacatctatgaaatagtaaaaggagacacacgagccatcggaatcatcagactttggaatgggcaagaacagaatggttcttcttggaggtgctgggtctcccggttataaaggatttgtccacctaggtttctttgttgtggctgtgagctcacttctcagcgtctctgctgtcactcaggctcctgaaggaaggaagaaggaactgagactggccggcggtgaaaacaactgtagtgggagagtggagctcaagatccacgagaagtggggcacagtgtgcggtaacggctggagcatgaacgaggtgtccgtggtttgccagcagctaggatgcccaactttgattaaagccccgggatgggctaacgccagcgcgggctctggggacatctggatggacaaggtttcttgcacagggaatgagtcagctctttgggactgcaaacatgaggggtggggaaagcacaactgtacccatgaacaagatgctggagtgacctgcgcagatggatctaatttggagatgagactggtgaacagcggggacaaccgatgctcaggaagagtagaaataaagttccagggaaagtgggggacagtgtgtgacgacaacttcagcaaagatcacgcttctgtgatttgtaaacaacttggatgtggaagtgccatcagtttctctggctcagctaaattaggagctggttctggacaaatctggcttgatgatctggcatgcaatggaaatgagtcagctatctgggactgcaaacaccggggatggggaaggcacaactgtgaccatgctgaggacgtcggtgtgatctgcttagacggagcggatctgagcctgagactggtggatggggtgtccaaatgttcaggaagattggaagtgagattccaaggagagtgggggaccgtgtgtgacgacagctgggatcgccgtgacgcttctgtggtgtgtaagcaactgggatgtccaactgccatcactgccattggccgagttaatgccagtgagggatccggaccaatttggcttgacagtatctcctgcgagggacatgagccggctctttgggagtgtaagcaccaggaatgggggaagcattactgtaaccacaaagaagacgctggcgtgacatgttctgatggagcagatctggaacttcgactcgtcggtggaggcagtcgctgtgctgggatggtggaggtggagattcagaagctgactgggaaggtgtgcagccgaggctggacactgacagatgccgacgtggtttgcagacagcttggatgtggctctgcacttcaaacacagtctaagatctactctaaaaccaaaactgaggcaacaaatacgtggctctttcctggctcttgcagtggaaatgaaacttctctttggcaatgtaaaaactggcagtggggcggcctttcctgtgatcatttcgaagaagcccaagttacttgctcaggccacaggaaacccagactggttggaggagaaatcccatgttccggtcgtgtggaagtgaaacacggagacacgtggggttccgtctgtgatttcgacttgtctctggaagctgccggcgtggtgtgcagggaattacaatgtggaacagtcgtctctatcctagggggagcacattttggagaaggaagcggacagatctggggtgaagaattccagtgtagtggagatgagtcccatctttctctgtgctcggtggcgcccccactggacagaacttgtagccacagcagggatgtcagcatagtctgctcacgatacatagatatccgtctggcagatggcaagtcctcctgtgagggaagagtggagctcaagacactcggagcctggggtcccctctgcagctctcactgggacatagaagatgctcatgtcttatgtcagcagcttaagtgtggagttgccctttctactccaggaggagcacattttgggaaaggagccggtcaggtctggaggcacaagttccactgcactggaactgaggagcatataggggattgccctatgactgctctgggtacaccgatgtgttctgacggacaggtagcctctgtaatttgctcaggaaaccaatcgcatacactgttgccatgtagttcatcatcttcggtccaaacaacaagttctaccattgcaaaggacagtgacgttccctgcatagcaagtggtcaactccgcttggtaggtggaggtggtcgctgcgctgggagagtagaggtctaccatgagggctcttggggcaccatctgtgatgacagctgggatctgacggatgccaatgtggtgtgcaagcagctggactgtggcgtggctattaatgccactggttctgcctactttggggaagggacaggagatatctggctagacgaaattgactgcagtggaaaagagtctcatatctggcagtgccattcacatggctggggacgccataactgcaggcacaaggaagatgcaggtgttgtctgctcggagttcatgtctctgaggctgaccaatgaagcccacagagtgaactgtacaggccgtctggaagtgttttacaatggtacatggggcagtattggcagcagcaatatgtctccaaccactgtgggggtggtgtgccgtcagctgggctgtgcagacaatggaacagtgaaacctacatcttcagacaagacaccaaccaggcccatgtggacagatagtgtgcagtgtccaaaaggagttgacactttgtggcagtgcccctcatcaccttggaaacagagacaagccagcccctcccaggagtcctggattgtctgtgacgacaaaataagactacaggaagggcatacagactgttctggacgtgtggagatctggcatagaggttcctggggaacagtgtgtgatgactcctgggatcttaatgatgctgaggttgcatgtaagcagctgggctgtggtcaagctgtggaggcactaaaagaagcagcatttggtccaggaactgggcccatatggctgaatgaaatgaagtgtagagggaatgagtcttccctgtgggattgtcctgccagaccatggagtcacagcgactgcgggcacaaagaagatgcttctgtgaagtgcctcccaagaatgactttagaatcacagcatggcacaggtcattcaaccctcactgcactcctggtttgtggagccattctattggtccttctcattgccttcctcttgtggactctgaagcgacgacagacccaacggcttacagtttcctcaagaggagaggtcttgatacatcaagttcagtaccaagagatggattcgaagacggatgatctggacttgctgaaatcctcgggtcagtga

SEQ ID NO: 1087 - DNA, 1182 bp, Homo sapiens
tagttctccctgagtgagacttgcctgcttctctggcccctggtcctgtcctgttctccagcatggtgtgtctgaagctccctggaggctcctgcatgacagcgctgacagtgacactgatggtgctgagctccccactggctttggctggggacacccgaccacgtttcttgtggcagcttaagtttgaatgtcatttcttcaatgggacggagcgggtgcggttgctggaaagatgcatctataaccaagaggagtccgtgcgcttcgacagcgacgtgggggagtaccgggcggtgacggagctggggcggcctgatgccgagtactggaacagccagaaggacctcctggagcagaggcgggccgcggtggacacctactgcagacacaactacggggttggtgagagcttcacagtgcagcggcgagttgagcctaaggtgactgtgtatccttcaaagacccagcccctgcagcaccacaacctcctggtctgctctgtgagtggtttctatccaggcagcattgaagtcaggtggttccggaacggccaggaagagaaggctggggtggtgtccacaggcctgatccagaatggagattggaccttccagaccctggtgatgctggaaacagttcctcggagtggagaggtttacacctgccaagtggagcacccaagtgtgacgagccctctcacagtggaatggagagcacggtctgaatctgcacagagcaagatgctgagtggagtcgggggcttcgtgctgggcctgctcttccttggggccgggctgttcatctacttcaggaatcagaaaggacactctggacttcagccaacaggattcctgagctgaaatgcagatgaccacattcaaggaagaaccttctgtcccagctttgcagaatgaaaagctttcctgcttggcagttattcttccacaagagagggctttctcaggacctggttgctactggttcggcaactgcagaaaatgtcctcccttgtggcttcctcagctcctgcccttggcctgaagtcccagcattgatgacagcgcctcatcttcaacttttgtgctcccctttgcctaaaccgtatggcctcccgtgcatctgtactcaccctgtacgacaaacacattacattattaaatgtttctcaaagatggagtt

SEQ ID NO: 1088 - DNA, 1543 bp, Homo sapiens
ggaatgtgggtggaggggttcatagttctccctgagtgagacttgcctgctgctctggcccctggtcctgtcctgttctccagcatggtgtgtctgaggctccctggaggctcctgcatggcagttctgacagtgacactgatggtgctgagctccccactggctttggctggggacaccagaccacgtttcttggaggaggttaagtttgagtgtcatttcttcaatgggacggagcgggtgcggttgctggaaagatacttccataaccaggaggagaacgtgcgcttcgacagcgacgtgggggagttccgggcggtgacggagctggggcggcctgatgccgagtactggaacagccagaaggacctcctggagcagaggcgtgccgcggtggacacctactgcagacacaactacggggttggtgagagcttcacagtgcagcggcgagtccatcctaaggtgactgtgtatccttcaaagacccagcccctgcagcaccataacctcctggtctgttctgtgagtggtttctatccaggcagcattgaagtcaggtggttccggaatggccaggaagagaagactggggtggtgtccacaggcctgatccacaatggagactggaccttccagaccctggtgatgctggaaacagttcctcggagtggagaggtttacacctgccaagtggagcacccaagcgtgacaagccctctcacagtggaatggagagcacggtctgaatctgcacagagcaagatgctgagtggagtcgggggctttgtgctgggcctgctcttccttggggccgggctgttcatctacttcaggaatcagaaaggacactctggacttcagccaagaggattcctgagctgaagtgcagatgacacattcaaagaagaactttctgccccagctttgcaggatgaaaagctttccctcctggctgttattcttccacaagagagggctttctcaggacctggttgctactggttcagcaactgcagaaaatgtcctcccttgtggcttcctcagctcctgttcttggcctgaagccccacagctttgatggcagtgcctcatcttcaacttttgtgctcccctttgcctaaaccctatggcctcctgtgcatctgtactcaccctgtaccacaaacacattacattattaaatgtttctcaaagatggagttaaatatcatctggtccatttggctccaaagacaaaaaatgaaaagaaaagaaaaagggaaggaagattatttcccaatagaataatgattttcatgtatatgtcatgagtgtgtgaggtaatacatatgttaaatagcttgctttagacattccacactataggcatatatcaaaacttcatgctgtacaacatgaatatgctatacaatttttacttgtcaattaaaaaaatgctaatatttaaaaaggtaatacataaaaactgagaacagactgtaacaactgaaacaaactgggcaaacatgagatgagaaaccaaccagcaagtcaatcagaa

SEQ ID NO: 1089 - DNA, 1145 bp, Homo sapiens
ttttttttttttttttttttttgactgaactaagtggcttttttattagagaaagccagaattacaaaagacttcccttttcttggggtatggctgtctcagcacaatactcaacataactgcagaactgatgtggctcaggcaccctggttttaattccttgaggatctggcaattggcttacgcaaaaggtcaccatttgaggtcctgccttactaattatgtgctgcccaacaactaaatttgtaatttgtttttctctagtttgagcagggtctgaattttttcatttatttccttttttgccagcagacagacttgagtctgtaaagacaagcaaatacactgacagaagtttaccatagtttctaaaatgtaaaaaagaaaacccccaaaagactcaagaaaattagaccacaaattttgcattgttcattgtagcactattggtaataaaataacaaatgtttgtgcatttttatgtgaagatccttctcgtatttcatttggaaagatgagcaagaggtctgcttccttcattttacttccccttctgtttttgaaaggcagtttcgccaagcttaatgcaagaatatctgactgtttagaagaaagatattgccacaatctctggatggttttccagggttgtgttattactgagcttcatctttccagaatgagcaaaacactgtccagtctttgttacgattttgtaataaatgtgtacattttttttaaatttttggacatcacatgaataaaggtatgtatgtacgaatgtgtatatattatatatatgacatctattttggaaaatgtttgccctgctgtacctcatttttaggaggtgtgcatggatgcaatatatgaaaatgggacattctggaactgctggtcaggggactttgtcgccctgtgcactaaaagggccagattttcagcagccaaggacatccatacccaagtgaatgtgatgggacttaaaagaagtgaactgagacaattcactctggctgtttgaacagcagcgtttcataggaagagaaaaaaagatcaatcttgtattttctgaccacataaaggcttcttctctttgtaataaagtagaaaagctctcctcaaaaaaaaaaaaaaaaaaaaaa

SEQ ID NO: 1090 - DNA, 1097 bp, Homo sapiens
tggcccctggtcctgtcctgttctccagcatggtgtgtctgaggctccctggaggctcctgcatggcagttctgacagtgacactgatggtgctgagctccccactggctttggctggggacaccagaccacgtttcttggagtactctacgtctgagtgtcatttcttcaatgggacggagcgggtgcggttcctggacagatacttctataaccaagaggagtacgtgcgcttcgacagcgacgtgggggagttccgggcggtgacggagctggggcggcctgatgaggagtactggaacagccagaaggacttcctggaagacaggcgggccgcggtggacacctactgcagacacaactacggggttggtgagagcttcacagtgcagcggcgagtccatcctaaggtgactgtgtatccttcaaagacccagcccctgcagcaccacaacctcctggtctgttctgtgagtggtttctatccaggcagcattgaagtcaggtggttccggaatggccaggaagagaagactggggtggtgtccacaggcctgatccacaatggagactggaccttccagaccctggtgatgctggaaacagttcctcggagtggagaggtttacacctgccaagtggagcacccaagcgtgacaagccctctcacagtggaatggagagcacggtctgaatctgcacagagcaagatgctgagtggagtcgggggctttgtgctgggcctgctcttccttggggccgggctgttcatctacttcaggaatcagaaaggacactctggacttcagccaagaggattcctgagctgaagtgcagatgacacattcaaagaagaactttctgccccagctttgcaggatgaaaagctttccctcctggctgttattcttccacaagagagggctttctcaggacctggttgctactggttcagcaactgcagaaaatgtcctcccttgtggcttcctcagctcctgttcttggcctgaagccccacagctttgatggcagcgcctcatcttcaacttttgtgctcccctttgcctaaaccctatggcctcctgtgcatctgtact

SEQ ID NO: 1091 - DNA, 547 bp, Homo sapiens
ccccagcacgtttcttggagcaggttaaacatgagtgtcatttcttcaacgggacggagcgggtgcggttcctggacagatacttctatcaccaagaggagtacgtgcgcttcgacagcgacgtgggggagtaccgggcggtgacggagctggggcggcctgatgccgagtactggaacagccagaaggacctcctggagcagaagcgggccgcggtggacacctactgcagacacaactacggggttggtgagagcttcacagtgcagcggcgagtctatcctgaggtgactgtgtatcctgcaaagacccagcccctgcagcaccacaacctcctggtctgctctgtgaatggtttctatccaggcagcattgaagtcaggtggttccggaacggccaggaagagaagactggggtggtgtccacaggcctgatccagaatggagactggaccttccagaccctggtgatgctggaaacagttcctcggagtggagaggtttacacctgccaagtggagcacccaagcctgacgagccctctcac

SEQ ID NO: 1092 - DNA, 942 bp, Homo sapiens
gcatggtgtgtctgaggctccctggaggctcctgcatggcagttctgacagtgacactgatggtgctgagctccccactggctttggctggggacaccagaccacgtttcttggaggaggttaagtttgagtgtcatttcttcaacgggacggagcgggtgcggttgctggaaagacgcgtccataaccaagaggagtacgcgcgctacgacagcgacgtgggggagtaccgggcggtgacggagctggggcggcctgatgccgagtactggaacagccagaaggacctcctggagcggaggcgtgccgcggtggacacctactgcagacacaactacggggttggtgagagcttcacagtgcagcggcgagttcaacctaaggtgactgtgtatccttcaaagacccagcccctgcagcaccacaacctcctggtctgttctgtgaatggtttctatccaggcagcattgaagtcaggtggttccggaacggccaggaagagaagactggggtggtgtccacgggcctgatccagaatgaagactggaccttccagaccctggtgatgctggaaacagttcctcagagtggagaggtttacacctgccaagtggagcacccaagtgtgatgagccctctcacagtggaatggagagcacggtctgaatctgcacagagcaagatgctgagtggagtcgggggctttgtgctgggcctgctcttccttggggccgggctgttcatctacttcaggaatcagaaaggacactctggacttccgccaacaggattcctgagctgaagtgcagatgaccacattcaaggaagaacctactgccccagctttgcaggatgaaaagctttgctgcctggctgttattcttccgcaagagagggctttctcaggacctggttgctactggttcagcaactgcagaaaa

SEQ ID NO: 1093 - DNA, 1171 bp, Homo sapiens
ccagcatggtgtgtctgaagctccctggaggttcctacatggcaaagctgacagtgacactgatggtgctgagctccccactggctttggctggggacacccgaccacgtttcttgcagcaggataagtatgagtgtcatttcttcaacgggacggagcgggtgcggttcctgcacagagacatctataaccaagaggaggacttgcgcttcgacagcgacgtgggggagtaccgggcggtgacggagctggggcggcctgacgctgagtactggaacagccagaaggacttcctggaagacaggcgcgccgcggtggacacctactgcagacacaactacggggttggtgagagcttcacagtgcagcggcgagttgagcctaaggtgactgtgtatcctgcaaggacccagaccctgcagcaccacaacctcctggtctgctctgtgaatggtttctatccaggcagcattgaagtcaggtggttccggaacagccaggaagagaaggctggggtggtgtccacaggcctgattcagaatggagactggaccttccagaccctggtgatgctggaaacagttcctcgaagtggagaggtttacacctgccaagtggagcacccaagcgtgacgagccctctcacagtggaatggagagcacagtctgaatctgcacagagcaagatgctgagtggagtcgggggctttgtgctgggcctgctcttccttggggccgggctattcatctacttcaagaatcagaaagggcactctggacttcacccaacaggactcgtgagctgaagtgcagatgaccacattcaagggggaaccttctgccccagctttgcatgatgaaaagctttcctgcttggctcttattcttccacaagagaggactttctcaggccctggttgctaccggttcagcaactctgcagaaaatgtccatccttgtggcttcctcagctcctgcccttggcctgaagtcccagcattgatggcagtgcctcatcttcaactttagtgctcccctttacctaaccctacggcctcccatgcatctgtactccccctgtgtgccacaaatgcactacgttattaaatttttctgaagcccagagttaaaaatcatctgtccacctggctccaaagacaaaaaataaaaa

SEQ ID NO: 1094 - DNA, 514 bp, Homo sapiens
ccccagcacgtttcttggagcaggttaaacatgagtgtcatttcttcaacgggacggagcgggtgcggttcctggacagatacttctatcaccaagaggagtacgtgcgcttcgacagcgacgtgggggagtaccgggcggtgacggagctggggcggcctgatgccgagtactggaacagccagaaggacctcctggagcagaagcgggccgcggtggacacctactgcagacacaactacggggttggtgagagcttcacagtgcagcggcgagtctatcctgaggtgactgtgtatcctgcaaagacccagcccctgcagcaccacaacctcctggtctgctctgtgaatggtttctatccaggcagcattgaagtcaggtggttccggaacggccaggaagagaagactggggtggtgtccacaggcctgatccagaatggagaagttcctcggagtggagaggtttacacctgccaagtggagcacccaagcctgacgagccctctcac

SEQ ID NO: 1095 - DNA, 3429 bp, Homo sapiens
gagacaaagcagcgcccgtctgcttcgggcctctggaatttagcgctcgcccagctagccgcagaaatgactgctgtccatgcaggcaacataaacttcaagtgggatcctaaaagtctagagatcaggactctggcagttgagagactgttggagcctcttgttacacaggttacaacccttgtaaacaccaatagtaaagggccctctaataagaagagaggtcgttctaagaaggcccatgttttggctgcatctgttgaacaagcaactgagaatttcttggagaagggggataaaattgcgaaggagagccagtttctcaaggaggagcttgtggctgctgtagaagatgttcgaaaacaaggtgatttgatgaaggctgctgcaggagagttcgcagatgatccctgctcttctgtgaagcgaggcaacatggttcgggcagctcgagctttgctctctgctgttacccggttgctgattttggctgacatggcagatgtctacaaattacttgttcagctgaaagttgtggaagatggtatcttgaagttgaggaatgctggcaatgaacaagacttaggaatccagtataaagccctaaaacctgaagtggataagctgaacattatggcagccaaaagacaacaggaattgaaagatgttggccatcgtgatcagatggctgcagctagaggaatcctgcagaagaacgttccgatcctctatactgcatcccaggcatgcctacagcaccctgatgtcgcagcctataaggccaacagggacctgatatacaagcagctgcagcaggcggtcacaggcatttccaatgcagcccaggccactgcctcagacgatgcctcacagcaccagggtggaggaggaggagaactggcatatgcactcaataactttgacaaacaaatcattgtggaccccttgagcttcagcgaggagcgctttaggccttccctggaggagcgtctggaaagcatcattagtggggctgccttgatggccgactcgtcctgcacgcgtgatgaccgtcgtgagcgaattgtggcagagtgtaatgctgtccgccaggccctgcaggacctgctttcggagtacatgggcaatgctggacgtaaagaaagaagtgatgcactcaattctgcaatagataaaatgaccaagaagaccagggacttgcgtagacagctccgcaaagctgtcatggaccacgtttcagattctttcctggaaaccaatgttccacttttggtattgattgaagctgcaaagaatggaaatgagaaagaagttaaggagtatgcccaagttttccgtgaacatgccaacaaattgattgaggttgccaacttggcctgttccatctcaaataatgaagaaggtgtaaagcttgttcgaatgtctgcaagccagttagaagccctctgtcctcaggttattaatgctgcactggctttagcagcaaaaccacagagtaaactggcccaagagaacatggatctttttaaagaacaatgggaaaaacaagtccgtgttctcacagatgctgtcgatgacattacttccattgatgacttcttggctgtctcagagaatcacattttggaagatgtgaacaaatgtgtcattgctctccaagagaaggatgtggatggcctggaccgcacagctggtgcaattcgaggccgggcagcccgggtcattcacgtagtcacctcagagatggacaactatgagccaggagtctacacagagaaggttctggaagccactaagctgctctccaacacagtcatgccacgttttactgagcaagtagaagcagccgtggaagccctcagctcggaccctgcccagcccatggatgagaatgagtttatcgatgcttcccgcctggtatatgatggcatccgggacatcaggaaagcagtgctgatgataaggacccctgaggagttggatgactctgactttgagacagaagattttgatgtcagaagcaggacgagcgtccagacagaagacgatcagctgatagctggccagagtgcccgggcgatcatggctcagcttccccaggagcaaaaagcgaagattgcggaacaggtggccagcttccaggaagaaaagagcaagctggatgctgaagtgtccaaatgggacgacagtggcaatgacatcattgtgctggccaagcagatgtgcatgattatgatggagatgacagactttacccgaggtaaaggaccactcaaaaatacatcggatgtcatcagtgctgccaagaaaattgctgaggcaggatccaggatggacaagcttggccgcaccattgcagaccattgccccgactcggcttgcaagcaggacctgctggcctacctgcaacgcatcgccctctactgccaccagctgaacatctgcagcaaggtcaaggccgaggtgcagaatctcggcggggagcttgttgtctctggggtggacagcgccatgtccctgatccaggcagccaagaacttgatgaatgctgtggtgcagacagtgaaggcatcctacgtcgcctctaccaaataccaaaagtcacagggtatggcttccctcaaccttcctgctgtgtcatggaagatgaaggcaccagagaaaaagccattggtgaagagagagaaacaggatgagacacagaccaagattaaacgggcatctcagaagaagcacgtgaacccggtgcaggccctcagcgagttcaaagctatggacagcatctaagtctgcccaggccggccgcccccacccctcggggctcctgaatatcagtcactgttcgtcactcaaatgaatttgctaaatacaacactgatactagattccacagggaaatgggcagactgaaccagtccaggtggtgaattttccaagaacatagtttaagttgattaaaaatgcttttagaatgcaggagcctacttctagctgtattttttgtatgcttaaataaaaataaaaattcataaccaaagagaatcccacattagcttgttagtaatgctctgaccaagccgagatgcccattctcttagtgatggcggcgttagggtttgagagaagggaatttggctcaacttcagttgagagggtgcagtccagacagcttgactgcttttaaatgaccaaagatgacctgtggtaagcaacctgggcatcttagaagcagtccctggagaaggcatgttcccagaaaggtctctggagggacaaactcactcagtaaaacataatgtatcatcatgaagaaaactgattctctatgacatgaaatgaaaattttaatgcattgttataattactaatgtacgctgctgcaggacattaataaagttgcttttttaggctacagtgtctcgatgccat

SEQ ID NO: 1096 - DNA, 4675 bp, Homo sapiens
agactgccgattctgcatagagagatcatctaaatgggcagaagcctgcacaatttatgaagtgctgatttaacaccagcctatgcaaggctggacgtaaagaaagaagtgatgcactcaattctgcaatagataaaatgaccaagaagaccagggacttgcgtagacagctccgcaaagctgtcatggaccacgtttcagattctttcctggaaaccaatgttccacttttggtattgattgaagctgcaaagaatggaaatgagaaagaagttaaggagtatgcccaagttttccgtgaacatgccaacaaattgattgaggttgccaacttggcctgttccatctcaaataatgaagaaggtgtaaagcttgttcgaatgtctgcaagccagttagaagccctctgtcctcaggttattaatgctgcactggctttagcagcaaaaccacagagtaaactggcccaagagaacatggatctttttaaagaacaatgggaaaaacaagtccgtgttctcacagatgctgtcgatgacattacttccattgatgacttcttggctgtctcagagaatcacattttggaagatgtgaacaaatgtgtcattgctctccaagagaaggatgtggatggcctggaccgcacagctggtgcaattcgaggccgggcagcccgggtcattcacgtagtcacctcagagatggacaactatgagccaggagtctacacagagaaggttctggaagccactaagctgctctccaacacagtcatgccacgttttactgagcaagtagaagcagccgtggaagccctcagctcggaccctgcccagcccatggatgagaatgagtttatcgatgcttcccgcctggtatatgatggcatccgggacatcaggaaagcagtgctgatgataaggacccctgaggagttggatgactctgactttgagacagaagattttgatgtcagaagcaggacgagcgtccagacagaagacgatcagctgatagctggccagagtgcccgggcgatcatggctcagcttccccaggagcaaaaagcgaagattgcggaacaggtggccagcttccaggaagaaaagagcaagctggatgctgaagtgtccaaatgggacgacagtggcaatgacatcattgtgctggccaagcagatgtgcatgattatgatggagatgacagactttacccgaggtaaaggaccactcaaaaatacatcagatgtcatcagtgctgccaagaaaattgctgaggcaggatccaggatggacaagcttggccgcaccattgcagaccattgccccgactcggcttgcaagcaggacctgctggcctacctgcaacgcatcgccctctactgccaccagctgaacatctgcagcaaggtcaaggccgaggtgcagaatctcggcggggagcttgttgtctctggggtggacagcgccatgtccctgatccaggcagccaagaacttgatgaatgctgtggtgcagacagtgaaggcatcctacgtcgcctctaccaaataccaaaagtcacagggtatggcttccctcaaccttcctgctgtgtcatggaagatgaaggcaccagagaaaaagccattggtgaagagagagaaacaggatgagacacagaccaagattaaacgggcatctcagaagaagcacgtgaacccggtgcaggccctcagcgagttcaaagctatggacagcatctaagtctgcccaggccggccgcccccacccctcggggctcctgaatatcagtcactgttcgtcactcaaatgaatttgctaaatacaacactgatactagattccacagggaaatgggcagactgaaccagtccaggtggtgaattttccaagaacatagtttaagttgattaaaaatgcttttagaatgcaggagcctacttctagctgtattttttgtatgcttaaataaaaataaaaattcataaccaaagagaatcccacattagcttgttagtaatgctctgaccaagccgagatgcccattctcttagtgatggcggcgttagggtttgagagaagggaatttggctcaacttcagttgagagggtgcagtccagacagcttgactgcttttaaatgaccaaagatgacctgtggtaagcaacctgggcatcttaggaagcagtccctggagaaggcatgttcccagaaaggtctctggagggacaaactcactcagtaaaacataatgtatcatcatgaagaaaactgattctctatgacatgaaatgaaaattttaatgcattgttataattactaatgtacgctgctgcaggacattaataaagttgcttttttaggctacagtgtctcgatgccataatcagaacacactttttttcctctttctcccagcttcaaatgcaaattcatcattgggctcacttctaataactgcagtgtttcccgccttgggcttgcagcagaaaaacctgacaacatagagtttgctaaggcagtaatttagactttaccttatttgtgattactgtagtgattgattgattactattaactacaaggtataatttactatcaccttatttaaattttatgaattaatttgaatgttttttacactaactaacttttcccaataaagtccactatgaaaccacgacatccaagaggccaaagtcgtcttctctgccttcaagtcatagatttgcccgcagtatctgtggtgctctgggccctcccggtgtccgtctcttccaggatggggatgcccgggagggaaactgtctgtggctctaggctgcacggctcgtgccaacccatcagggagggccatgcccgttgtcctattgagtgccccaccctgcacccccaccttgggaattcacatgtccattccttgaggttcatgtcaacctcggaggcatccctgtcttcattatagctgacccctctcctgcgtccttctgtcagcatatcccttctgcatccttcccgtcacacatacataccaagctatgatgattgattgatagtggccttcgagatgaaaaccatccttaaccccatgatccttcccagctggcatccccaccctaagcaaggttccctaaagagaagcttgttgtcattttctccccttcctcacttacagtcagctgtcaccttgctccctccacctcccctcgtcaaggtgactgccttccactgccagccacactggcaattgtcttgagacctcaccgtgcaagcggcctgggggcgtggcggggaggaggaggaggacaaggactcctgaacgctgctcactcggcttccaggacaccccgctcaggttctgcctgccttactgggggctcctcctcctttcctggggctgagaggttgtgtctgtgcccactctcctgagctcagccagaatctcgcatgtaaagacatccaaatgccgacttcttctccccagagcctggcttttataactgactgccgcctcacgctccattcggatgtctaatgaatctctcagacttgacctgtccaaactgcttgccacctctactcgccaccgcccacccccacaccctccataccgttttccccacgtcactgcccctcccccccttcctcttgccaaatgcctaaaaataaaaattctgaggtggatctgtagcacaatgggcttctagtgacaaatcaaaattctgatctttaaaatgtatgcacaatttacctgttaccgcctggcctaagccatcctgctgttactgctgtgtagcaagttgcagccaaagcgacctcacacggctcctgaaggtcaagaatctgggagcagctcagctggatggctgtgactcggggtctcatgaagtggccaagatgccagctaaggctgccgtctctgaaggcttgacctggcgaggatttgcttccagactcactcgcgtggctattgacagaaggcctcagttccatgccacatggcccgttccacagagcagctcacagcttggtagtagctggcttccccagagcggtatctgcgagcagcgtccagatggaagccatggtgttcccttaaaacctgatacggagggtgattccccatcatgtctgtattctgtgggtcacacagaccaaggccggtccactgtggaaggcaaggacgaggttgccagtgcccggcggtgggcggccacagccagcctccctgccagtgtcccccacagccaagttgtccctgtaagacaggtcagctcaggtcattccgagctcagaccttccaacggcgtccatgtccctcagtaaaagccagagtcctaaaggcctcttgcctgctctggcctcctctcaccattctctgccatcctccatctgcccctggtgtccctgaagtcttgaacatgccgagcacatcctgcctcgtatgcttcctggcctggaatgcacttgccccgggacaccctgtgctggctttagcgtttccttcctgtctcctcaagtcaccttattatcaaaaggactccgacaggctaagtgtggtggctcatgcctgtagtcccagcactcgggaaggccgaggtgggaggatcgcttgagcccaggagttcaggacctgcctgggcaacatggcaaaactttgtctctctt

SEQ ID NO: 1097 - DNA, 5739 bp, Homo sapiens
ttcctcctcctagccggactggagggagacaaagcagcgcccgtctgcttcgggcctctggaatttagcgctcgcccagctagccgcagaaatgactgctgtccatgcaggcaacataaacttcaagtgggatcctaaaagtctagagatcaggactctggcagttgagagactgttggagcctcttgttacacaggttacaacccttgtaaacaccaatagtaaagggccctctaataagaagagaggtcgttctaagaaggcccatgttttggctgcatctgttgaacaagcaactgagaatttcttggagaagggggataaaattgcgaaggagagccagtttctcaaggaggagcttgtggctgctgtagaagatgttcgaaaacaaggtgatttgatgaaggctgctgcaggagagttcgcagatgatccctgctcttctgtgaagcgaggcaacatggttcgggcagctcgagctttgctctctgctgttacccggttgctgattttggctgacatggcagatgtctacaaattacttgttcagctgaaagttgtggaagatggtatcttgaagttgaggaatgctggcaatgaacaagacttaggaatccagtataaagccctcaaacctgaagtggataagctgaacattatggcagccaaaagacaacaggaattgaaagatgttggccatcgtgatcagatggctgcagctagaggaatcctgcagaagaacgttccgatcctctatactgcatcccaggcatgcctacagcaccctgatgtcgcagcctataaggccaacagggacctgatatacaagcagctgcagcaggcggtcacaggcatttccaatgcagcccaggccactgcctcagacgatgcctcacagcaccagggtggaggaggaggagaactggcatatgcactcaataactttgacaaacaaatcattgtggaccccttgagcttcagcgaggagcgctttaggccttccctggaggagcgtctggaaagcatcattagtggggctgccttgatggccgactcgtcctgcacgcgtgatgaccgtcgtgagcgaattgtggcagagtgtaatgctgtccgccaggccctgcaggacctgctttcggagtacatgggcaatgctggacgtaaagaaagaagtgatgcactcaattctgcaatagataaaatgaccaagaagaccagggacttgcgtagacagctccgcaaagctgtcatggaccacgtttcagattctttcctggaaaccaatgttccacttttggtattgattgaagctgcaaagaatggaaatgagaaagaagttaaggagtatgcccaagttttccgtgaacatgccaacaaattgattgaggttgccaacttggcctgttccatctcaaataatgaagaaggtgtaaagcttgttcgaatgtctgcaagccagttagaagccctctgtcctcaggttattaatgctgcactggctttagcagcaaaaccacagagtaaactggcccaagagaacatggatctttttaaagaacaatgggaaaaacaagtccgtgttctcacagatgctgtcgatgacattacttccattgatgacttcttggctgtctcagagaatcacattttggaagatgtgaacaaatgtgtcattgctctccaagagaaggatgtggatggcctggaccgcacagctggtgcaattcgaggccgggcagcccgggtcattcacgtagtcacctcagagatggacaactatgagccaggagtctacacagagaaggttctggaagccactaagctgctctccaacacagtcatgccacgttttactgagcaagtagaagcagccgtggaagccctcagctcggaccctgcccagcccatggatgagaatgagtttatcgatgcttcccgcctggtatatgatggcatccgggacatcaggaaagcagtgctgatgataaggacccctgaggagttggatgactctgactttgagacagaagattttgatgtcagaagcaggacgagcgtccagacagaagacgatcagctgatagctggccagagtgcccgggcgatcatggctcagcttccccaggagcaaaaagcgaagattgcggaacaggtggccagcttccaggaagaaaagagcaagctggatgctgaagtgtccaaatgggacgacagtggcaatgacatcattgtgctggccaagcagatgtgcatgattatgatggagatgacagactttacccgaggtaaaggaccactcaaaaatacatcagatgtcatcagtgctgccaagaaaattgctgaggcaggatccaggatggacaagcttggccgcaccattgcagaccattgccccgactcggcttgcaagcaggacctgctggcctacctgcaacgcatcgccctctactgccaccagctgaacatctgcagcaaggtcaaggccgaggtgcagaatctcggcggggagcttgttgtctctggggtggacagcgccatgtccctgatccaggcagccaagaacttgatgaatgctgtggtgcagacagtgaaggcatcctacgtcgcctctaccaaataccaaaagtcacagggtatggcttccctcaaccttcctgctgtgtcatggaagatgaaggcaccagagaaaaagccattggtgaagagagagaaacaggatgagacacagaccaagattaaacgggcatctcagaagaagcacgtgaacccggtgcaggccctcagcgagttcaaagctatggacagcatctaagtctgcccaggccggccgcccccacccctcggggctcctgaatatcagtcactgttcgtcactcaaatgaatttgctaaatacaacactgatactagattccacagggaaatgggcagactgaaccagtccaggtggtgaattttccaagaacatagtttaagttgattaaaaatgcttttagaatgcaggagcctacttctagctgtattttttgtatgcttaaataaaaataaaaattcataaccaaagagaatcccacattagcttgttagtaatgctctgaccaagccgagatgcccattctcttagtgatggcggcgttagggtttgagagaagggaatttggctcaacttcagttgagagggtgcagtccagacagcttgactgcttttaaatgaccaaagatgacctgtggtaagcaacctgggcatcttaggaagcagtccctggagaaggcatgttcccagaaaggtctctggagggacaaactcactcagtaaaacataatgtatcatcatgaagaaaactgattctctatgacatgaaatgaaaattttaatgcattgttataattactaatgtacgctgctgcaggacattaataaagttgcttttttaggctacagtgtctcgatgccataatcagaacacactttttttcctctttctcccagcttcaaatgcaaattcatcattgggctcacttctaataactgcagtgtttcccgccttgggcttgcagcagaaaaacctgacaacatagagtttgctaaggcagtaatttagactttaccttatttgtgattactgtagtgattgattgattactattaactacaaggtataatttactatcaccttatttaaattttatgaattaatttgaatgttttttacactaactaacttttcccaataaagtccactatgaaaccacgacatccaagaggccaaagtcgtcttctctgccttcaagtcatagatttgcccgcagtatctgtggtgctctgggccctcccggtgtccgtctcttccaggatggggatgcccgggagggaaactgtctgtggctctaggctgcacggctcgtgccaacccatcagggagggccatgcccgttgtcctattgagtgccccaccctgcacccccaccttgggaattcacatgtccattccttgaggttcatgtcaacctcggaggcatccctgtcttcattatagctgacccctctcctgcgtccttctgtcagcatatcccttctgcatccttcccgtcacacatacataccaagctatgatgattgattgatagtggccttcgagatgaaaaccatccttaaccccatgatccttcccagctggcatccccaccctaagcaaggttccctaaagagaagcttgttgtcattttctccccttcctcacttacagtcagctgtcaccttgctccctccacctcccctcgtcaaggtgactgccttccactgccagccacactggcaattgtcttgagacctcaccgtgcaagcggcctgggggcgtggcggggaggaggaggaggacaaggactcctgaacgctgctcactcggcttccaggacaccccgctcaggttctgcctgccttactgggggctcctcctcctttcctggggctgagaggttgtgtctgtgcccactctcctgagctcagccagaatctcgcatgtaaagacatccaaatgccgacttcttctccccagagcctggcttttataactgactgccgcctcacgctccattcggatgtctaatgaatctctcagacttgacctgtccaaactgcttgccacctctactcgccaccgcccacccccacaccctccataccgttttccccacgtcactgcccctcccccccttcctcttgccaaatgcctaaaaataaaaattctgaggtggatctgtagcacaatgggcttctagtgacaaatcaaaattctgatctttaaaatgtatgcacaatttacctgttaccgcctggcctaagccatcctgctgttactgctgtgtagcaagttgcagccaaagcgacctcacacggctcctgaaggtcaagaatctgggagcagctcagctggatggctgtgactcggggtctcatgaagtggccaagatgccagctaaggctgccgtctctgaaggcttgacctggcgaggatttgcttccagactcactcgcgtggctattgacagaaggcctcagttccatgccacatggcccgttccacagagcagctcacagcttggtagtagctggcttccccagagcggtatctgcgagcagcgtccagatggaagccatggtgttcccttaaaacctgatacggagggtgattccccatcatgtctgtattctgtgggtcacacagaccaaggccggtccactgtggaaggcaaggacgaggttgccagtgcccggcggtgggcggccacagccagcctccctgccagtgtcccccacagccaagttgtccctgtaagacaggtcagctcaggtcattccgagctcagaccttccaacggcgtccatgtccctcagtaaaagccagagtcctaaaggcctcttgcctgctctggcctcctctcaccattctctgccatcctccatctgcccctggtgtccctgaagtcttgaacatgccgagcacatcctgcctcgtatgcttcctggcctggaatgcacttgccccgggacaccctgtgctggctttagcgtttccttcctgtctcctcaagtcaccttattatcaaaaggactccgacaggctaagtgtggtggctcatgcctgtagtcccagcactcgggaaggccgaggtgggaggatcgcttgagcccaggagttcaggacctgcctgggcaacatggcaaaactttgtctctctt

SEQ ID NO: 1098 - DNA, 5995 bp, Homo sapiens
gttgggcagtcgctggcgctgccgctggtggtccctgtgcttgaagtgccggtggtatcggagtccatgcacccaaggcccagcacccagcaacattctctggcccagcagaggggataccccaaaccaagacagatgtctcacaaaacacaagcagagatgtcagtcttcaggcctcgcatggagaagatgaaagagaggggtggcttttccaaagcccagcgtcagcacgaagcttccacgagattattttccctcttattttgaagtcctgaaatgactgctgtccatgcaggcaacataaacttcaagtgggatcctaaaagtctagagatcaggactctggcagttgagagactgttggagcctcttgttacacaggttacaacccttgtaaacaccaatagtaaagggccctctaataagaagagaggtcgttctaagaaggcccatgttttggctgcatctgttgaacaagcaactgagaatttcttggagaagggggataaaattgcgaaggagagccagtttctcaaggaggagcttgtggctgctgtagaagatgttcgaaaacaaggtgatttgatgaaggctgctgcaggagagttcgcagatgatccctgctcttctgtgaagcgaggcaacatggttcgggcagctcgagctttgctctctgctgttacccggttgctgattttggctgacatggcagatgtctacaaattacttgttcagctgaaagttgtggaagatggtatcttgaagttgaggaatgctggcaatgaacaagacttaggaatccagtataaagccctcaaacctgaagtggataagctgaacattatggcagccaaaagacaacaggaattgaaagatgttggccatcgtgatcagatggctgcagctagaggaatcctgcagaagaacgttccgatcctctatactgcatcccaggcatgcctacagcaccctgatgtcgcagcctataaggccaacagggacctgatatacaagcagctgcagcaggcggtcacaggcatttccaatgcagcccaggccactgcctcagacgatgcctcacagcaccagggtggaggaggaggagaactggcatatgcactcaataactttgacaaacaaatcattgtggaccccttgagcttcagcgaggagcgctttaggccttccctggaggagcgtctggaaagcatcattagtggggctgccttgatggccgactcgtcctgcacgcgtgatgaccgtcgtgagcgaattgtggcagagtgtaatgctgtccgccaggccctgcaggacctgctttcggagtacatgggcaatgctggacgtaaagaaagaagtgatgcactcaattctgcaatagataaaatgaccaagaagaccagggacttgcgtagacagctccgcaaagctgtcatggaccacgtttcagattctttcctggaaaccaatgttccacttttggtattgattgaagctgcaaagaatggaaatgagaaagaagttaaggagtatgcccaagttttccgtgaacatgccaacaaattgattgaggttgccaacttggcctgttccatctcaaataatgaagaaggtgtaaagcttgttcgaatgtctgcaagccagttagaagccctctgtcctcaggttattaatgctgcactggctttagcagcaaaaccacagagtaaactggcccaagagaacatggatctttttaaagaacaatgggaaaaacaagtccgtgttctcacagatgctgtcgatgacattacttccattgatgacttcttggctgtctcagagaatcacattttggaagatgtgaacaaatgtgtcattgctctccaagagaaggatgtggatggcctggaccgcacagctggtgcaattcgaggccgggcagcccgggtcattcacgtagtcacctcagagatggacaactatgagccaggagtctacacagagaaggttctggaagccactaagctgctctccaacacagtcatgccacgttttactgagcaagtagaagcagccgtggaagccctcagctcggaccctgcccagcccatggatgagaatgagtttatcgatgcttcccgcctggtatatgatggcatccgggacatcaggaaagcagtgctgatgataaggacccctgaggagttggatgactctgactttgagacagaagattttgatgtcagaagcaggacgagcgtccagacagaagacgatcagctgatagctggccagagtgcccgggcgatcatggctcagcttccccaggagcaaaaagcgaagattgcggaacaggtggccagcttccaggaagaaaagagcaagctggatgctgaagtgtccaaatgggacgacagtggcaatgacatcattgtgctggccaagcagatgtgcatgattatgatggagatgacagactttacccgaggtaaaggaccactcaaaaatacatcagatgtcatcagtgctgccaagaaaattgctgaggcaggatccaggatggacaagcttggccgcaccattgcagaccattgccccgactcggcttgcaagcaggacctgctggcctacctgcaacgcatcgccctctactgccaccagctgaacatctgcagcaaggtcaaggccgaggtgcagaatctcggcggggagcttgttgtctctgggaactgtgacacctgcggggcactgcaagggctgaaaggctggcctcctcccctttgctggccactcactgggtggacagcgccatgtccctgatccaggcagccaagaacttgatgaatgctgtggtgcagacagtgaaggcatcctacgtcgcctctaccaaataccaaaagtcacagggtatggcttccctcaaccttcctgctgtgtcatggaagatgaaggcaccagagaaaaagccattggtgaagagagagaaacaggatgagacacagaccaagattaaacgggcatctcagaagaagcacgtgaacccggtgcaggccctcagcgagttcaaagctatggacagcatctaagtctgcccaggccggccgcccccacccctcggggctcctgaatatcagtcactgttcgtcactcaaatgaatttgctaaatacaacactgatactagattccacagggaaatgggcagactgaaccagtccaggtggtgaattttccaagaacatagtttaagttgattaaaaatgcttttagaatgcaggagcctacttctagctgtattttttgtatgcttaaataaaaataaaaattcataaccaaagagaatcccacattagcttgttagtaatgctctgaccaagccgagatgcccattctcttagtgatggcggcgttagggtttgagagaagggaatttggctcaacttcagttgagagggtgcagtccagacagcttgactgcttttaaatgaccaaagatgacctgtggtaagcaacctgggcatcttaggaagcagtccctggagaaggcatgttcccagaaaggtctctggagggacaaactcactcagtaaaacataatgtatcatcatgaagaaaactgattctctatgacatgaaatgaaaattttaatgcattgttataattactaatgtacgctgctgcaggacattaataaagttgcttttttaggctacagtgtctcgatgccataatcagaacacactttttttcctctttctcccagcttcaaatgcaaattcatcattgggctcacttctaataactgcagtgtttcccgccttgggcttgcagcagaaaaacctgacaacatagagtttgctaaggcagtaatttagactttaccttatttgtgattactgtagtgattgattgattactattaactacaaggtataatttactatcaccttatttaaattttatgaattaatttgaatgttttttacactaactaacttttcccaataaagtccactatgaaaccacgacatccaagaggccaaagtcgtcttctctgccttcaagtcatagatttgcccgcagtatctgtggtgctctgggccctcccggtgtccgtctcttccaggatggggatgcccgggagggaaactgtctgtggctctaggctgcacggctcgtgccaacccatcagggagggccatgcccgttgtcctattgagtgccccaccctgcacccccaccttgggaattcacatgtccattccttgaggttcatgtcaacctcggaggcatccctgtcttcattatagctgacccctctcctgcgtccttctgtcagcatatcccttctgcatccttcccgtcacacatacataccaagctatgatgattgattgatagtggccttcgagatgaaaaccatccttaaccccatgatccttcccagctggcatccccaccctaagcaaggttccctaaagagaagcttgttgtcattttctccccttcctcacttacagtcagctgtcaccttgctccctccacctcccctcgtcaaggtgactgccttccactgccagccacactggcaattgtcttgagacctcaccgtgcaagcggcctgggggcgtggcggggaggaggaggaggacaaggactcctgaacgctgctcactcggcttccaggacaccccgctcaggttctgcctgccttactgggggctcctcctcctttcctggggctgagaggttgtgtctgtgcccactctcctgagctcagccagaatctcgcatgtaaagacatccaaatgccgacttcttctccccagagcctggcttttataactgactgccgcctcacgctccattcggatgtctaatgaatctctcagacttgacctgtccaaactgcttgccacctctactcgccaccgcccacccccacaccctccataccgttttccccacgtcactgcccctcccccccttcctcttgccaaatgcctaaaaataaaaattctgaggtggatctgtagcacaatgggcttctagtgacaaatcaaaattctgatctttaaaatgtatgcacaatttacctgttaccgcctggcctaagccatcctgctgttactgctgtgtagcaagttgcagccaaagcgacctcacacggctcctgaaggtcaagaatctgggagcagctcagctggatggctgtgactcggggtctcatgaagtggccaagatgccagctaaggctgccgtctctgaaggcttgacctggcgaggatttgcttccagactcactcgcgtggctattgacagaaggcctcagttccatgccacatggcccgttccacagagcagctcacagcttggtagtagctggcttccccagagcggtatctgcgagcagcgtccagatggaagccatggtgttcccttaaaacctgatacggagggtgattccccatcatgtctgtattctgtgggtcacacagaccaaggccggtccactgtggaaggcaaggacgaggttgccagtgcccggcggtgggcggccacagccagcctccctgccagtgtcccccacagccaagttgtccctgtaagacaggtcagctcaggtcattccgagctcagaccttccaacggcgtccatgtccctcagtaaaagccagagtcctaaaggcctcttgcctgctctggcctcctctcaccattctctgccatcctccatctgcccctggtgtccctgaagtcttgaacatgccgagcacatcctgcctcgtatgcttcctggcctggaatgcacttgccccgggacaccctgtgctggctttagcgtttccttcctgtctcctcaagtcaccttattatcaaaaggactccgacaggctaagtgtggtggctcatgcctgtagtcccagcactcgggaaggccgaggtgggaggatcgcttgagcccaggagttcaggacctgcctgggcaacatggcaaaactttgtctctctt

SEQ ID NO: 1099 - DNA, 2699 bp, Homo sapiens
  misc_feature (1740)..(1740): n is a, c, g, or t
ggcccgcggcggccgaaatccgcggttcacagcatgtccgcctcggcccctgctgcggagggggagggaacccccacccagcccgcgtccgagaaagaacccgaaatgcccggtcccagagaggagagcgaggaggaagaggacgaggacgacgaggaggaggaggaggaggaaaaagaaaagagtctcatcgtggaaggcaagagggaaaagaaaaaagtagagaggttgacaatgcaagtctcttccttacagagagagccatttacaattgcacaaggaaaggggcagaaactttgtgaaattgagaggatacatttttttctaagtaagaagaaaaccgatgaacttagaaatctacacaaactgctttacaacaggccaggcactgtgtcctcattaaagaagaatgtgggtcagttcagtggctttccatttgaaaaaggaagtgtccaatataaaaagaaggaagaaatgttgaaaaaatttagaaatgccatgttaaagagcatctgtgaggttcttgatttggagagatcaggtgtaaatagtgaactagtgaagaggatcttgaatttcttaatgcatccaaagccttctggcaaaccattgccgaaatctaaaaaaacttgtagcaaaggcagtaaaaaggaacggaacagttctggaatggcaaggaaggctaagcgaaccaaatgtcctgaaattctgtcagatgaatctagtagtgatgaagatgaaaagaaaaacaaggaagagtcttcagatgatgaagataaagaaagtgaagaggagccaccaaaaaagacagccaaaagagaaaaacctaaacagaaagctacttctaaaagtaaaaaatctgtgaaaagtgccaatgttaagaaagcagatagcagcaccaccaagaagaatcaaaacagttccaaaaaagaaagtgagtctgaggatagttcagatgatgaacctttaattaaaaagttgaagaaaccccctacagatgaagagttaaaggaaacaataaagaaattactggccagtgctaacttggaagaagtcacaatgaaacagatttgcaaaaaggtctatgaaaattatcctacttatgatttaactgaaagaaaagatttcataaaaacaactgtaaaagagctaatttcttgagatagaggacagagaagatgactcgttcccatagatttgaagatctgatttataccattataccagcaaagagaatgtatttccttttctaaatccttgttaagcaacgttagtagaacttactgctgacctttttatcttgagtgttatgtgaatttgagtttgctgttttaaattgcatttctatgccatttttagtttaaaatcttgcatggcattaattgttccttgcttttatagttgtattttgtacattttggatttctttatataaggtcatagattcttgagctgttgtggtttttagtgcacttaatattagcttgcttaaggcatacttttaatcaagtagaacaaaaactattatcaccaggatttatacatacagagattgtagtatttagtatatgaaatattttgaatacacatctctgtcagtgtgaaaattcagcggcagtgtgtccatcatattaaaaatatacaagctacagttgtccagatcactgaattggaacttttctcctgcatgtgtatatatgtcaaattgtcagcatgacaaaagtgacagatgttattttngtatttttaaaaaacaattggttgtatataaagtttttttatttcttttgtgcagatcactttttaaactcacataggtaggtatctttatagttgtagactatggaatgtcagtgttcagccaaacagtatgatggaacagtgaaagtcaattcagtgatggcaacactgaaggaacagttaccctgctttgcctcgaaagtgtcatcaatttgtaattttagtattaactctgtaaaagtgtctgtaggtacgttttatattatataaggacagaccaaaaatcaacctatcaaagcttcaaaaactttgggaaagggtgggattaagtacaagcacatttggcttacagtaaatgaactgatttttattaactgcttttgcccatataaaatgctgatatttactggaaacctagccagcttcacgattatgactaaagtaccagattataatgccagaatataatgtgcaggcaatcgtggatgtctctgacaaagtgtgtctcaaaaataatatacttttacattaaagaaatttaatgtttctctggagttggggctcttggctttcagagtttggttaatcagtgttgattctagatgatcaacataatggaccactcctgaatgagacttaattttgtctttcaaatttactgtcttaaatcagtttattaaatctgaattttaaaacatgctgtttatgacacaatgacacatttgttgcaccaattaagtgttgaaaaatatctttgcatcatagaacagaaatatataaaaatatatgttgaatgttaacaggtattttcacaggtttgtttcttgatagttactcagacactagggaaaggtaaatacaagtgaacaaaataagcaactaaatgagacctaataattggccttcgattttaaatatttgttcttataaaccttgtcaataaaaataaatctaaatca

SEQ ID NO: 1100 - DNA, 3211 bp, Homo sapiens
accgccattttgaaaatcttgttgattctggggagccgagcgcgcggcgcgagcgtcacgccagacagcggcccgcgcgccttctcctcggcgtcggccgccgccgcctcccagaacctcctcgtgccctcgcgtgccaggcccgcggcggccgaaatccgcggttcacagcatgtccgcctcggcccctgctgcggagggggagggaacccccacccagcccgcgtccgagaaagaacccgaaatgcccggtcccagagaggagagcgaggaggaagaggacgaggacgacgaggaggaggaggaggaggaaaaagaaaagagtctcatcgtggaaggcaagagggaaaagaaaaaagtagagaggttgacaatgcaagtctcttccttacagagagagccatttacaattgcacaaggaaaggggcagaaactttgtgaaattgagaggatacatttttttctaagtaagaagaaaaccgatgaacttagaaatctacacaaactgctttacaacaggccaggcactgtgtcctcattaaagaagaatgtgggtcagttcagtggctttccatttgaaaaaggaagtgtccaatataaaaagaaggaagaaatgttgaaaaaatttagaaatgccatgttaaagagcatctgtgaggttcttgatttggagagatcaggtgtaaatagtgaactagtgaagaggatcttgaatttcttaatgcatccaaagccttctggcaaaccattgccgaaatctaaaaaaacttgtagcaaaggcagtaaaaaggaacggaacagttctggaatggcaaggaaggctaagcgaaccaaatgtcctgaaattctgtcagatgaatctagtagtgatgaagatgaaaagaaaaacaaggaagagtcttcagatgatgaagataaagaaagtgaagaggagccaccaaaaaagacagccaaaagagaaaaacctaaacagaaagctacttctaaaagtaaaaaatctgtgaaaagtgccaatgttaagaaagcagatagcagcaccaccaagaagaatcaaaacagttccaaaaaagaaagtgagtctgaggatagttcagatgatgaacctttaattaaaaagttgaagaaaccccctacagatgaagagttaaaggaaacaataaagaaattactggccagtgctaacttggaagaagtcacaatgaaacagatttgcaaaaaggtctatgaaaattatcctacttatgatttaactgaaagaaaagatttcataaaaacaactgtaaaagaggtaaatatttcagtctttcaagtttgactttagaaatataagacaaaagtaattacataaaatactccatatttttcaaaatattcatgtcactaaatatcacatttgatcctcacatttcttcataatagggaaatttatttcttctcattcccactttaaagcttaaaattaaagtttgaacagttagtgataagacctgaactcagattatgatgtggcctcatggtgtacctgggtagctgggcatctcaacgttgctctcacaaatacttgaggaagttcctgtctacgaggcaaaggtgaggggaagatcagcaggtagctgtaattctgtattgatctcaactgatttttgaaggacaaaatagtaaaatagatgtggaaaaaatgggataaaggtttatgatttatggcaaaataatgtttctctttcattacagctaatttcttgagatagaggacagagaagatgactcgttcccatagatttgaagatctgatttataccattataccagcaaagagaatgtatttccttttctaaatccttgttaagcaacgttagtagaacttactgctgacctttttatcttgagtgttatgtgaatttgagtttgctgttttaaattgcatttctatgccatttttagtttaaaatcttgcatggcattaattgttccttgcttttatagttgtattttgtacattttggatttctttatataaggtcatagattcttgagctgttgtggtttttagtgcacttaatattagcttgcttaaggcatacttttaatcaagtagaacaaaaactattatcaccaggatttatacatacagagattgtagtatttagtatatgaaatattttgaatacacatctctgtcagtgtgaaaattcagcggcagtgtgtccatcatattaaaaatatacaagctacagttgtccagatcactgaattggaacttttctcctgcatgtgtatatatgtcaaattgtcagcatgacaaaagtgacagatgttatttttgtatttttaaaaaacaattggttgtatataaagtttttttatttcttttgtgcagatcactttttaaactcacataggtaggtatctttatagttgtagactatggaatgtcagtgttcagccaaacagtatgatggaacagtgaaagtcaattcagtgatggcaacactgaaggaacagttaccctgctttgcctcgaaagtgtcatcaatttgtaattttagtattaactctgtaaaagtgtctgtaggtacgttttatattatataaggacagaccaaaaatcaacctatcaaagcttcaaaaactttgggaaagggtgggattaagtacaagcacatttggcttacagtaaatgaactgatttttattaactgaaaataatatacttttacattaaagaaatttaatgtttctctggagttggggctcttggctttcagagtttggttaatcagtgttgattctagatgatcaacataatggaccactcctgaatgagacttaattttgtctttcaaatttactgtcttaaatcagtttattaaatctgaattttaaaacatgctgtttatgacacaatgacacatttgttgcaccaattaagtgttgaaaaatatctttgcatcatagaacagaaatatataaaaatatatgttgaatgttaacaggtattttcacaggtttgtttcttgatagttactcagacactagggaaaggtaaatacaagtgaacaaaataagcaactaaatgagacctaataattggccttcgattttaaatatttgttcttataaaccttgtcaataaaaataaatctaaatcactggtgttttaagtcacttgcatttgatatcttataggtgtatatagcatttccttatgggg

SEQ ID NO: 1101 - DNA, 2737 bp, Homo sapiens
gttcacagcatgtccgcctcggcccctgctgcggagggggagggaacccccacccagcccgcgtccgagaaagaacccgaaatgcccggtcccagagaggagagcgaggaggaagaggacgaggacgacgaggaggaggaggaggaggaaaaagaaaagagtctcatcgtggaaggcaagagggaaaagaaaaaagtagagaggttgacaatgcaagtctcttccttacagagagagccatttacaattgcacaaggaaaggggcagaaactttgtgaaattgagaggatacatttttttctaagtaagaagaaaaccgatgaacttagaaatctacacaaactgctttacaacaggccaggcactgtgtcctcattaaagaagaatgtgggtcagttcagtggctttccatttgaaaaaggaagtgtccaatataaaaagaaggaagaaatgttgaaaaaatttagaaatgccatgttaaagagcatctgtgaggttcttgatttggagagatcaggtgtaaatagtgaactagtgaagaggatcttgaatttcttaatgcatccaaagccttctggcaaaccattgccgaaatctaaaaaaacttgtagcaaaggcagtaaaaaggaacggaacagttctggaatggcaaggaaggctaagcgaaccaaatgtcctgaaattctgtcagatgaatctagtagtgatgaagatgaaaagaaaaacaaggaagagtcttcagatgatgaagataaagaaagtgaagaggagccaccaaaaaagacagccaaaagagaaaaacctaaacagaaagctacttctaaaagtaaaaaatctgtgaaaagtgccaatgttaagaaagcagatagcagcaccaccaagaagaatcaaaacagttccaaaaaagaaagtgagtctgaggatagttcagatgatgaacctttaattaaaaagttgaagaaaccccctacagatgaagagttaaaggaaacaataaagaaattactggccagtgctaacttggaagaagtcacaatgaaacagatttgcaaaaaggtctatgaaaattatcctacttatgatttaactgaaagaaaagatttcataaaaacaactgtaaaagagctaatttcttgagatagaggacagagaagatgactcgttcccatagatttgaagatctgatttataccattataccagcaaagagaatgtatttccttttctaaatccttgttaagcaacgttagtagaacttactgctgacctttttatcttgagtgttatgtgaatttgagtttgctgttttaaattgcatttctatgccatttttagtttaaaatcttgcatggcattaattgttccttgcttttatagttgtattttgtacattttggatttctttatataaggtcatagattcttgagctgttgtggtttttagtgcacttaatattagcttgcttaaggcatacttttaatcaagtagaacaaaaactattatcaccaggatttatacatacagagattgtagtatttagtatatgaaatattttgaatacacatctctgtcagtgtgaaaattcagcggcagtgtgtccatcatattaaaaatatacaagctacagttgtccagatcactgaattggaacttttctcctgcatgtgtatatatgtcaaattgtcagcatgacaaaagtgacagatgttatttttgtatttttaaaaaacaattggttgtatataaagtttttttatttcttttgtgcagatcactttttaaactcacataggtaggtatctttatagttgtagactatggaatgtcagtgttcagccaaacagtatgatggaacagtgaaagtcaattcagtgatggcaacactgaaggaacagttaccctgctttgcctcgaaagtgtcatcaatttgtaattttagtattaactctgtaaaagtgtctgtaggtacgttttatattatataaggacagaccaaaaatcaacctatcaaagcttcaaaaactttgggaaagggtgggattaagtacaagcacatttggcttacagtaaatgaactgatttttattaactgcttttgcccatataaaatgctgatatttactggaaacctagccagcttcacgattatgactaaagtaccagattataatgccagaatataatgtgcaggcaatcgtggatgtctctgacaaagtgtgtctcaaaaataatatacttttacattaaagaaatttaatgtttctctggagttggggctcttggctttcagagtttggttaatcagtgttgattctagatgatcaacataatggaccactcctgaatgagacttaattttgtctttcaaatttactgtcttaaatcagtttattaaatctgaattttaaaacatgctgtttatgacacaatgacacatttgttgcaccaattaagtgttgaaaaatatctttgcatcatagaacagaaatatataaaaatatatgttgaatgttaacaggtattttcacaggtttgtttcttgatagttactcagacactagggaaaggtaaatacaagtgaacaaaataagcaactaaatgagacctaataattggccttcgattttaaatatttgttcttataaaccttgtcaataaaaataaatctaaatcactggtgttttaagtcacttgcatttgatatcttataggtgtatatagcatttccttatgggg

SEQ ID NO: 1102 - DNA, 2900 bp, Homo sapiens
accgccattttgaaaatcttgttgattctggggagccgagcgcgcggcgcgagcgtcacgccagacagcggcccgcgcgccttctcctcggcgtcggccgccgccgcctcccagaacctcctcgtgccctcgcgtgccaggcccgcggcggccgaaatccgcggttcacagcatgtccgcctcggcccctgctgcggagggggagggaacccccacccagcccgcgtccgagaaagaacccgaaatgcccggtcccagagaggagagcgaggaggaagaggacgaggacgacgaggaggaggaggaggaggaaaaagaaaagagtctcatcgtggaaggcaagagggaaaagaaaaaagtagagaggttgacaatgcaagtctcttccttacagagagagccatttacaattgcacaaggaaaggggcagaaactttgtgaaattgagaggatacatttttttctaagtaagaagaaaaccgatgaacttagaaatctacacaaactgctttacaacaggccaggcactgtgtcctcattaaagaagaatgtgggtcagttcagtggctttccatttgaaaaaggaagtgtccaatataaaaagaaggaagaaatgttgaaaaaatttagaaatgccatgttaaagagcatctgtgaggttcttgatttggagagatcaggtgtaaatagtgaactagtgaagaggatcttgaatttcttaatgcatccaaagccttctggcaaaccattgccgaaatctaaaaaaacttgtagcaaaggcagtaaaaaggaacggaacagttctggaatggcaaggaaggctaagcgaaccaaatgtcctgaaattctgtcagatgaatctagtagtgatgaagatgaaaagaaaaacaaggaagagtcttcagatgatgaagataaagaaagtgaagaggagccaccaaaaaagacagccaaaagagaaaaacctaaacagaaagctacttctaaaagtaaaaaatctgtgaaaagtgccaatgttaagaaagcagatagcagcaccaccaagaagaatcaaaacagttccaaaaaagaaagtgagtctgaggatagttcagatgatgaacctttaattaaaaagttgaagaaaccccctacagatgaagagttaaaggaaacaataaagaaattactggccagtgctaacttggaagaagtcacaatgaaacagatttgcaaaaaggtctatgaaaattatcctacttatgatttaactgaaagaaaagatttcataaaaacaactgtaaaagagctaatttcttgagatagaggacagagaagatgactcgttcccatagatttgaagatctgatttataccattataccagcaaagagaatgtatttccttttctaaatccttgttaagcaacgttagtagaacttactgctgacctttttatcttgagtgttatgtgaatttgagtttgctgttttaaattgcatttctatgccatttttagtttaaaatcttgcatggcattaattgttccttgcttttatagttgtattttgtacattttggatttctttatataaggtcatagattcttgagctgttgtggtttttagtgcacttaatattagcttgcttaaggcatacttttaatcaagtagaacaaaaactattatcaccaggatttatacatacagagattgtagtatttagtatatgaaatattttgaatacacatctctgtcagtgtgaaaattcagcggcagtgtgtccatcatattaaaaatatacaagctacagttgtccagatcactgaattggaacttttctcctgcatgtgtatatatgtcaaattgtcagcatgacaaaagtgacagatgttatttttgtatttttaaaaaacaattggttgtatataaagtttttttatttcttttgtgcagatcactttttaaactcacataggtaggtatctttatagttgtagactatggaatgtcagtgttcagccaaacagtatgatggaacagtgaaagtcaattcagtgatggcaacactgaaggaacagttaccctgctttgcctcgaaagtgtcatcaatttgtaattttagtattaactctgtaaaagtgtctgtaggtacgttttatattatataaggacagaccaaaaatcaacctatcaaagcttcaaaaactttgggaaagggtgggattaagtacaagcacatttggcttacagtaaatgaactgatttttattaactgcttttgcccatataaaatgctgatatttactggaaacctagccagcttcacgattatgactaaagtaccagattataatgccagaatataatgtgcaggcaatcgtggatgtctctgacaaagtgtgtctcaaaaataatatacttttacattaaagaaatttaatgtttctctggagttggggctcttggctttcagagtttggttaatcagtgttgattctagatgatcaacataatggaccactcctgaatgagacttaattttgtctttcaaatttactgtcttaaatcagtttattaaatctgaattttaaaacatgctgtttatgacacaatgacacatttgttgcaccaattaagtgttgaaaaatatctttgcatcatagaacagaaatatataaaaatatatgttgaatgttaacaggtattttcacaggtttgtttcttgatagttactcagacactagggaaaggtaaatacaagtgaacaaaataagcaactaaatgagacctaataattggccttcgattttaaatatttgttcttataaaccttgtcaataaaaataaatctaaatcactggtgttttaagtcacttgcatttgatatcttataggtgtatatagcatttccttatgggg

SEQ ID NO: 1103 - DNA, 3226 bp, Homo sapiens; identical to SEQ ID NO: 1030

SEQ ID NO: 1104 - DNA, 2720 bp, Homo sapiens
gagaagagctggaggaagtgagaggtcggctgggggtcctcaaagtgagaggggagcagaggatcctcccgtgcaggctgtggatgtcactcacttcccagctggtgaagcctcgctgcagagatgcatctgctcccagccctggcaggggtcctggccacactcgtcctcgcccagccctgtgagggcactgacccagcctcccctggggcagtggagacctcggtcctgcgagactgcatagcagaggccaagttgctggtggatgctgcctacaattggacccagaagagcatcaagcagcggcttcgcagcggttcagccagccccatggacctcctgtcctacttcaaacaaccggtagcagccaccaggacagttgttcgggccgcagattatatgcatgtggctttggggctgcttgaagagaagttacaaccccagcggtccggacccttcaatgtcactgatgtgctaacagaaccacagctgcggctgctgtcccaggccagtggctgtgctctccgggaccaggccgagcgctgcagcgacaagtaccgcaccatcactggacggtgcaacaacaagaggagacccttgctaggggcctccaaccaggctctggctcgctggctgcccgccgagtatgaggatgggctgtcgctccccttcggctggacccccagcaggaggcgcaatggcttccttctccctcttgtccgggctgtctccaaccagattgtgcgcttccccaatgagagactgacctccgaccgtggccgagccctcatgttcatgcagtggggccagttcattgaccatgacctggacttctccccggagtccccggccagagtggccttcactgcaggcgttgactgtgagaggacctgcgcccagctgcccccctgctttcccatcaagatcccacccaatgacccccgcatcaagaaccagcgtgactgcatccctttcttccgctcggcaccctcatgcccccaaaacaagaacagagtccgcaaccagatcaacgcgctcacctcctttgtggacgccagcatggtgtatggcagtgaggtctccctctcgctgcggctccgcaaccggaccaactacctggggctgctggccatcaaccagcgctttcaagacaacggccgggccctgctgcccttcgacaacctgcacgatgacccctgtctcctcaccaaccgctcggcgcgcatcccctgcttcctggcaggtgacacccgatcaacggaaacccccaaactggcagccatgcacaccctctttatgcgagagcacaaccggctggccaccgagctgagacgcctgaatccccggtggaatggagacaaactgtacaatgaggctcggaagatcatgggggccatggtccagatcatcacctaccgagactttctgcccctggttctgggcaaggcccgggccaggagaaccctggggcactacagggggtactgctccaatgtggacccacgggtggccaatgtcttcaccctggccttccgctttggccacacaatgctccagcccttcatgttccgcttggacagtcagtaccgggcctccgcacccaactcgcatgtcccacttagctctgccttctttgccagctggcggatcgtgtatgaagggggcatcgaccccatcctccggggcctcatggccacccctgccaagctgaaccgtcaggatgccatgttagtggatgagctccgggaccggctgtttcggcaagtgaggaggattgggctggacctggcagctctcaacatgcaacgaagccgggaccacggccttccagggtacaatgcttggaggcgcttctgtgggctctcccagccccggaatttggcacagcttagccgggtgctgaaaaaccaggacttggcaaggaagttcctgaatttgtatggaacacctgacaacattgacatctggattggggccatcgctgagcctcttttgccgggggctcgagtggggcctcttctggcttgtctgttcgagaaccagttcagaagagcccgagacggagacaggttctggtggcagaaacgaggtgttttcaccaaaagacagcgcaaggccctgagcagaatttccttgtctcgaattatatgtgacaataccggtatcaccacggtttcaagggacatcttcagagccaacatctaccctcggggctttgtgaactgcagccgtatccccaggttgaacctatcagcctggcgagggacatgaggcttctgcaggagtctatcccaagtctccaacttttggagacaaggggaaggggaggaccatgaggctgccttgtctccctggagcaagtgcaggctgctgacgcttctgctggctacagctcagagctgggttccccagccaggagtgaaggctgggggctcctatcagcaatggaccttcccgccttgggagcctcttaggtattaggctatgaatcagcgccacgtgcaaaggcttgggagccaagccatgtggtcttgcaccccaggcaagaaaagtcagctggagggtttacagcactttctactgtttcccagccctccctcccctccctcaccatgactaagagaccactcggtcctagcctccagacaccccacaatactcctctgagcctgaggccaggcagcatgctctgcttctaccaataaagcactgctaagggc

SEQ ID NO: 1105 - DNA, 2664 bp, Homo sapiens
gagaagagctggaggaagtgagaggtcggctgggggtcctcaaagtgagaggggagcagaggatcctcccgtgcaggctgtggatgtcactcacttcccagctggtgaagcctcgctgcagagatgcatctgctcccagccctggcaggggtcctggccacactcgtcctcgcccagccctgtgagggcactgacccagcctcccctggggcagtggagacctcggtcctgcgagactgcatagcagaggccaagttgctggtggatgctgcctacaattggacccagaagagcatcaagcagcggcttcgcagcggttcagccagccccatggacctcctgtcctacttcaaacaaccggtagcagccaccaggacagttgttcgggccgcagattatatgcatgtggctttggggctgcttgaagagaagttacaaccccagcggtccggacccttcaatgtcactgatgtgctaacagaaccacagctgcggctgctgtcccaggccagtggctgtgctctccgggaccaggccgagcgctgcagcgacaagtaccgcaccatcactggacggtgcaacaacaagaggagacccttgctaggggcctccaaccaggctctggctcgctggctgcccgccgagtatgaggatgggctgtcgctccccttcggctggacccccagcaggaggcgcaatggcttccttctccctcttgtccgggctgtctccaaccagattgtgcgcttccccaatgagagactgacctccgaccgtggccgagccctcatgttcatgcagtggggccagttcattgaccatgacctggacttctccccggagtccccggccagagtggccttcactgcaggcgttgactgtgagaggacctgcgcccagctgcccccctgctttcccatcaagatcccacccaatgacccccgcatcaagaaccagcgtgactgcatccctttcttccgctcggcaccctcatgcccccaaaacaagaacagagtccgcaaccagatcaacgcgctcacctcctttgtggacgccagcatggtgtatggcagtgaggtctccctctcgctgcggctccgcaaccggaccaactacctggggctgctggccatcaaccagcgctttcaagacaacggccgggccctgctgcccttcgacaacctgcacgatgacccctgtctcctcaccaaccgctcggcgcgcatcccctgcttcctggcaggtgacacccgatcaacggaaacccccaaactggcagccatgcacaccctctttatgcgagagcacaaccggctggccaccgagctgagacgcctgaatccccggtggaatggagacaaactgtacaatgaggctcggaagatcatgggggccatggtccagatcatcacctaccgagactttctgcccctggttctgggcaaggcccgggccaggagaaccctggggcactacagggggtactgctccaatgtggacccacgggtggccaatgtcttcaccctggccttccgctttggccacacaatgctccagcccttcatgttccgcttggacagtcagtaccgggcctccgcacccaactcgcatgtcccacttagctctgccttctttgccagctggcggatcgtgtatgaaggtgaccaggttttccagggggcaaatggggggggcatcgaccccatcctccggggcctcatggccacccctgccaagctgaaccgtcaggatgccatgttagtggatgagctccgggaccggctgtttcggcaagtgaggaggattgggctggacctggcagctctcaacatgcaacgaagccgggaccacggccttccagggtacaatgcttggaggcgcttctgtgggctctcccagccccggaatttggcacagcttagccgggtgctgaaaaaccaggacttggcaaggaagttcctgaatttgtatggaacacctgacaacattgacatctggattggggccatcgctgagcctcttttgccgggggctcgagtggggcctcttctggcttgtctgttcgagaaccagttcagaagagcccgagacggagacaggtaagtgaccctatcataaaagacatcagcaccagaggcagagcagaaaaacactagcatttcaagactaaacattgaagaacactgctctttttagtatcatttcttccaagttcacaggatctgaaatcaggaggctcctctctgaaaagctgggtcaaaggaagagagacactgacccaggcaaggcccatattgcctgagctggagtcatcttaaacccagaggttgcctggcagcctcactattctgggttggtggatcccagaaaacatgggcagaaagggctaaatctggtttccctccaatacatttgtgatttaagacctgacggccgggcgcggtggctcacgcctgtaatcccagcactttgggaggccgaggcgggcggatcacgaggtcaggagatcgagaccatcccggctaaaacggtgaaaccccgtctctactaaaaatacaaaaaattagccgggcgtagtggcgggcgcctgtagtcccggctacttgggaggctgaggcaggagaatggcgtgaacccgggaggcggagcttgcagtgagccgag

SEQ ID NO: 1106 - DNA, 2282 bp, Homo sapiens
gagaagagctggaggaagtgagaggtcggctgggggtcctcaaagtgagaggggagcagaggatcctcccgtgcaggctgtggatgtcactcacttcccagctggtgaagcctcgctgcagagatgcatctgctcccagccctggcaggggtcctggccacactcgtcctcgcccagccctgtgagggcactgacccagcctcccctggggcagtggagacctcggtcctgcgagactgcatagcagaggccaagttgctggtggatgctgcctacaattggacccagaagagcatcaagcagcggcttcgcagcggttcagccagccccatggacctcctgtcctacttcaaacaaccggtagcagccaccaggacagttgttcgggccgcagattatatgcatgtggctttggggctgcttgaagagaagttacaaccccagcggtccggacccttcaatgtcactgatgtgctaacagaaccacagctgcggctgctgtcccaggccagtggctgtgctctccgggaccaggccgagcgctgcagcgacaagtaccgcaccatcactggacggtgcaacaacaagaggagacccttgctaggggcctccaaccaggctctggctcgctggctgcccgccgagtatgaggatgggctgtcgctccccttcggctggacccccagcaggaggcgcaatggcttccttctccctcttgtccgggctgtctccaaccagattgtgcgcttccccaatgagagactgacctccgaccgtggccgagccctcatgttcatgcagtggggccagttcattgaccatgacctggacttctccccggagtccccggccagagtggccttcactgcaggcgttgactgtgagaggacctgcgcccagctgcccccctgctttcccatcaagatcccacccaatgacccccgcatcaagaaccagcgtgactgcatccctttcttccgctcggcaccctcatgcccccaaaacaagaacagagtccgcaaccagatcaacgcgctcacctcctttgtggacgccagcatggtgtatggcagtgaggtctccctctcgctgcggctccgcaaccggaccaactacctggggctgctggccatcaaccagcgctttcaagacaacggccgggccctgctgcccttcgacaacctgcacgatgacccctgtctcctcaccaaccgctcggcgcgcatcccctgcttcctggcaggtgacacccgatcaacggaaacccccaaactggcagccatgcacaccctctttatgcgagagcacaaccggctggccaccgagctgagacgcctgaatccccggtggaatggagacaaactgtacaatgaggctcggaagatcatgggggccatggtccagatcatcacctaccgagactttctgcccctggttctgggcaaggcccgggccaggagaaccctggggcactacagggggtactgctccaatgtggacccacgggtggccaatgtcttcaccctggccttccgctttggccacacaatgctccagcccttcatgttccgcttggacagtcagtaccgggcctccgcacccaactcgcatgtcccacttagctctgccttctttgccagctggcggatcgtgtatgaagggggcatcgaccccatcctccggggcctcatggccacccctgccaagctgaaccgtcaggatgccatgttagtggatgagctccgggaccggctgtttcggcaagtgaggaggattgggctggacctggcagctctcaacatgcaacgaagccgggaccacggccttccagggtacaatgcttggaggcgcttctgtgggctctcccagccccggaatttggcacagcttagccgggtgctgaaaaaccaggacttggcaaggaagttcctgaatttgtatggaacacctgacaacattgacatctggattggggccatcgctgagcctcttttgccgggggctcgagtggggcctcttctggcttgtctgttcgagaaccagttcagaagagcccgagacggagacaggttctggtggcagaaacgaggtgttttcaccaaaagacagcgcaaggccctgagcagaatttccttgtctcgaattatatgtgacaataccggtatcaccacggtttcaagggacatcttcagagccaacatctaccctcggggctttgtgaactgcagccgtatccccaggttgaacctatcagcctggcgagggacatgaggcttctgcag

SEQ ID NO: 1107 - DNA, 1391 bp, Homo sapiens
ctatgatggacgtattctctagccaattactagacggtattctcagacgggccgcctccattgccaatgaaatcttccagcggggtcgcggtaggcgggccgtggaccctctggtataaggcggtcccgggggagtgaggagaaagggggggtcttggcggccggaggaggagtaggtgcgggtgaagatggcggcagccgaggccgcgaactgcatcatggaggtgtcctgtggccaggcggaaagcagtgagaagcccaacgctgaggacatgacatccaaagattactactttgactcctacgcacactttggcatccacgaggagatgctgaaggacgaggtgcgcaccctcacttaccgcaactccatgtttcataaccggcacctcttcaaggacaaggtggtgctggacgtcggctcgggcaccggcatcctctgcatgtttgctgccaaggccggggcccgcaaggtcatcgggatcgagtgttccagtatctctgattatgcggtgaagatcgtcaaagccaacaagttagaccacgtggtgaccatcatcaaggggaaggtggaggaggtggagctcccagtggagaaggaggtggacatctataccgtcaaggtggaagacctgaccttcacctccccgttctgcctgcaagtgaagcggaatgactacgtgcacgccctggtggcctacttcaacatcgagttcacacgctgccacaagaggaccggcttctccaccagccccgagtccccgtacacgcactggaagcagacggtgttctacatggaggactacctgaccgtgaagacgggcgaggagatcttcggcaccatcggcatgcggcccaacgccaagaacaaccgggacctggacttcaccatcgacctggacttcaagggccagctgtgcgagctgtcctgctccaccgactaccggatgcgctgaggcccggctctcccgccctgcacgagcccaggggctgagcgttcctaggcggtttcggggctcccccttcctctccctccctcccgcagaagggggttttaggggcctgggctggggggatggggagggcacatcgtgactgtgtttttcataacttatgtttttatatggttgcatttacgccaataaatcctcagctggggtctggctttgtttcctgggggcaaaggaggtttggggttcctttcgcaggtactgcagtgccagcctcagcagtggggggaccggccttggcacctgctggtggctgccattctgtggatctgcgtctcccgtcccccgtctctaggcctcttgctccccttccttggttccttctcggggtccctgtcctccacagctgtctctcagggtctttgtccaactcttttcatc

SEQ ID NO: 1108 - DNA, 4294 bp, Homo sapiens
ttttgttgttgttgtttttttaattgcattgggattaggcaacagaagggtctaatgcggccgggatgagacaggagagtttttaggagggtagctgcgttctaagtaagggactctgctggggtaaaagaggcgcaagcgttgcaagaagggagtgcagggggttgagcaggcacctctacaggaaatggatgctgtccaggtgctggtgggcgccccagggctacgtggcgaagcagctcagccggtccaatcagagtgcgtccagggctcgggtttcgcgatctttaagtgactgaggcagatccccacgcggcacctggccatgctctcagctctcccgccgcgggatggtgccttgagtgaatgacccccttggagaacattcttccgcatccctcgcctcaagccagcctcagacagaaaactgaagattcagcagatccagtgcttcctgctcctcttctgcccaggaacacgcttgccttccccaaggcttccagaagctctgaggcaggaggcaccaagttctacctcatgtttggaggatcttgctagctatggccctcgtactcggctccctgttgctgctggggctgtgcgggaactccttttcaggagggcagccttcatccacagatgctcctaaggcttggaattatgaattgcctgcaacaaattatgagacccaagactcccataaagctggacccattggcattctctttgaactagtgcatatctttctctatgtggtacagccgcgtgatttcccagaagatactttgagaaaattcttacagaaggcatatgaatccaaaattgattatgacaagattgtctactatgaagcagggattattctatgctgtgtcctggggctgctgtttattattctgatgcctctggtggggtatttcttttgtatgtgtcgttgctgtaacaaatgtggtggagaaatgcaccagcgacagaaggaaaatgggcccttcctgaggaaatgctttgcaatctccctgttggtgatttgtataataataagcattggcatcttctatggttttgtggcaaatcaccaggtaagaacccggatcaaaaggagtcggaaactggcagatagcaatttcaaggacttgcgaactctcttgaatgaaactccagagcaaatcaaatatatattggcccagtacaacactaccaaggacaaggcgttcacagatctgaacagtatcaattcagtgctaggaggcggaattcttgaccgactgagacccaacatcatccctgttcttgatgagattaagtccatggcaacagcgatcaaggagaccaaagaggcgttggagaacatgaacagcaccttgaagagcttgcaccaacaaagtacacagcttagcagcagtctgaccagcgtgaaaactagcctgcggtcatctctcaatgaccctctgtgcttggtgcatccatcaagtgaaacctgcaacagcatcagattgtctctaagccagctgaatagcaaccctgaactgaggcagcttccacccgtggatgcagaacttgacaacgttaataacgttcttaggacagatttggatggcctggtccaacagggctatcaatcccttaatgatatacctgacagagtacaacgccaaaccacgactgtcgtagcaggtatcaaaagggtcttgaattccattggttcagatatcgacaatgtaactcagcgtcttcctattcaggatatactctcagcattctctgtttatgttaataacactgaaagttacatccacagaaatttacctacattggaagagtatgattcatactggtggctgggtggcctggtcatctgctctctgctgaccctcatcgtgattttttactacctgggcttactgtgtggcgtgtgcggctatgacaggcatgccaccccgaccacccgaggctgtgtctccaacaccggaggcgtcttcctcatggttggagttggattaagtttcctcttttgctggatattgatgatcattgtggttcttacctttgtctttggtgcaaatgtggaaaaactgatctgtgaaccttacacgagcaaggaattattccgggttttggatacaccctacttactaaatgaagactgggaatactatctctctgggaagctatttaataaatcaaaaatgaagctcacttttgaacaagtttacagtgactgcaaaaaaaatagaggcacttacggcactcttcacctgcagaacagcttcaatatcagtgaacatctcaacattaatgagcatactggaagcataagcagtgaattggaaagtctgaaggtaaatcttaatatctttctgttgggtgcagcaggaagaaaaaaccttcaggattttgctgcttgtggaatagacagaatgaattatgacagctacttggctcagactggtaaatcccccgcaggagtgaatcttttatcatttgcatatgatctagaagcaaaagcaaacagtttgcccccaggaaatttgaggaactccctgaaaagagatgcacaaactattaaaacaattcaccagcaacgagtccttcctatagaacaatcactgagcactctataccaaagcgtcaagatacttcaacgcacagggaatggattgttggagagagtaactaggattctagcttctctggattttgctcagaacttcatcacaaacaatacttcctctgttattattgaggaaactaagaagtatgggagaacaataataggatattttgaacattatctgcagtggatcgagttctctatcagtgagaaagtggcatcgtgcaaacctgtggccaccgctctagatactgctgttgatgtctttctgtgtagctacattatcgaccccttgaatttgttttggtttggcataggaaaagctactgtatttttacttccggctctaatttttgcggtaaaactggctaagtactatcgtcgaatggattcggaggacgtgtacgatgatgttgaaactatacccatgaaaaatatggaaaatggtaataatggttatcataaagatcatgtatatggtattcacaatcctgttatgacaagcccatcacaacattgatagctgatgttgaaactgcttgagcatcaggatactcaaagtggaaaggatcacagatttttggtagtttctgggtctacaaggactttccaaatccaggagcaacgccagtggcaacgtagtgactcaggcgggcaccaaggcaacggcaccattggtctctgggtagtgctttaagaatgaacacaatcacgttatagtccatggtccatcactattcaaggatgactccctcccttcctgtctatttttgttttttacttttttacactgagtttctatttagacactacaacatatggggtgtttgttcccattggatgcatttctatcaaaactctatcaaatgtgatggctagattctaacatattgccatgtgtggagtgtgctgaacacacaccagtttacaggaaagatgcattttgtgtacagtaaacggtgtatataccttttgttaccacagagttttttaaacaaatgagtattataggactttcttctaaatgagctaaataagtcaccattgacttcttggtgctgttgaaaataatccattttcactaaaagtgtgtgaaacctacagcatattcttcacgcagagattttcatctattatactttatcaaagattggccatgttccacttggaaatggcatgcaaaagcaatcatagagaaacctgcgtaactccatctgacaaattcaaaagagagagagagatcttgagagagaaatgctgttcgttcaaaagtggagttgttttaacagatgccaattacggtgtacagtttaacagagttttctgttgcattaggataaacattaattggagtgcagctaacatgagtatcatcagactagtatcaagtgttctaaaatgaaatatgagaagatcctgtcacaattcttagatctggtgtccagcatggatgaaacctttgagtttggtccctaaatttgcatgaaagcacaaggtaaatattcatttgcttcaggagtttcatgttggatctgtcattatcaaaagtgatcagcaatgaagaactggtcggacaaaatttaacgttgatgtaatggaattccagatgtaggcattccccccaggtcttttcatgtgcagattgcagttctgattcatttgaataaaaaggaacttggaaaa

SEQ ID NO: 1109 - DNA, 4321 bp, Homo sapiens
ttttgttgttgttgtttttttaattgcattgggattaggcaacagaagggtctaatgcggccgggatgagacaggagagtttttaggagggtagctgcgttctaagtaagggactctgctggggtaaaagaggcgcaagcgttgcaagaagggagtgcagggggttgagcaggcacctctacaggaaatggatgctgtccaggtgctggtgggcgccccagggctacgtggcgaagcagctcagccggtccaatcagagtgcgtccagggctcgggtttcgcgatctttaagtgactgaggcagatccccacgcggcacctggccatgctctcagctctcccgccgcgggatggtgccttgagtgaatgacccccttggagaacattcttccgcatccctcgcctcaagccagcctcagacagaaaactgaagattcagcagatccagtgcttcctgctcctcttctgcccaggaacacgcttgccttccccaaggcttccagaagctctgaggcaggaggcaccaagttctacctcatgtttggaggatcttgctagctatggccctcgtactcggctccctgttgctgctggggctgtgcgggaactccttttcaggagggcagccttcatccacagatgctcctaaggcttggaattatgaattgcctgcaacaaattatgagacccaagactcccataaagctggacccattggcattctctttgaactagtgcatatctttctctatgtggtacagccgcgtgatttcccagaagatactttgagaaaattcttacagaaggcatatgaatccaaaattgattatgacaagccagaaactgtaatcttaggtctaaagattgtctactatgaagcagggattattctatgctgtgtcctggggctgctgtttattattctgatgcctctggtggggtatttcttttgtatgtgtcgttgctgtaacaaatgtggtggagaaatgcaccagcgacagaaggaaaatgggcccttcctgaggaaatgctttgcaatctccctgttggtgatttgtataataataagcattggcatcttctatggttttgtggcaaatcaccaggtaagaacccggatcaaaaggagtcggaaactggcagatagcaatttcaaggacttgcgaactctcttgaatgaaactccagagcaaatcaaatatatattggcccagtacaacactaccaaggacaaggcgttcacagatctgaacagtatcaattcagtgctaggaggcggaattcttgaccgactgagacccaacatcatccctgttcttgatgagattaagtccatggcaacagcgatcaaggagaccaaagaggcgttggagaacatgaacagcaccttgaagagcttgcaccaacaaagtacacagcttagcagcagtctgaccagcgtgaaaactagcctgcggtcatctctcaatgaccctctgtgcttggtgcatccatcaagtgaaacctgcaacagcatcagattgtctctaagccagctgaatagcaaccctgaactgaggcagcttccacccgtggatgcagaacttgacaacgttaataacgttcttaggacagatttggatggcctggtccaacagggctatcaatcccttaatgatatacctgacagagtacaacgccaaaccacgactgtcgtagcaggtatcaaaagggtcttgaattccattggttcagatatcgacaatgtaactcagcgtcttcctattcaggatatactctcagcattctctgtttatgttaataacactgaaagttacatccacagaaatttacctacattggaagagtatgattcatactggtggctgggtggcctggtcatctgctctctgctgaccctcatcgtgattttttactacctgggcttactgtgtggcgtgtgcggctatgacaggcatgccaccccgaccacccgaggctgtgtctccaacaccggaggcgtcttcctcatggttggagttggattaagtttcctcttttgctggatattgatgatcattgtggttcttacctttgtctttggtgcaaatgtggaaaaactgatctgtgaaccttacacgagcaaggaattattccgggttttggatacaccctacttactaaatgaagactgggaatactatctctctgggaagctatttaataaatcaaaaatgaagctcacttttgaacaagtttacagtgactgcaaaaaaaatagaggcacttacggcactcttcacctgcagaacagcttcaatatcagtgaacatctcaacattaatgagcatactggaagcataagcagtgaattggaaagtctgaaggtaaatcttaatatctttctgttgggtgcagcaggaagaaaaaaccttcaggattttgctgcttgtggaatagacagaatgaattatgacagctacttggctcagactggtaaatcccccgcaggagtgaatcttttatcatttgcatatgatctagaagcaaaagcaaacagtttgcccccaggaaatttgaggaactccctgaaaagagatgcacaaactattaaaacaattcaccagcaacgagtccttcctatagaacaatcactgagcactctataccaaagcgtcaagatacttcaacgcacagggaatggattgttggagagagtaactaggattctagcttctctggattttgctcagaacttcatcacaaacaatacttcctctgttattattgaggaaactaagaagtatgggagaacaataataggatattttgaacattatctgcagtggatcgagttctctatcagtgagaaagtggcatcgtgcaaacctgtggccaccgctctagatactgctgttgatgtctttctgtgtagctacattatcgaccccttgaatttgttttggtttggcataggaaaagctactgtatttttacttccggctctaatttttgcggtaaaactggctaagtactatcgtcgaatggattcggaggacgtgtacgatgatgttgaaactatacccatgaaaaatatggaaaatggtaataatggttatcataaagatcatgtatatggtattcacaatcctgttatgacaagcccatcacaacattgatagctgatgttgaaactgcttgagcatcaggatactcaaagtggaaaggatcacagatttttggtagtttctgggtctacaaggactttccaaatccaggagcaacgccagtggcaacgtagtgactcaggcgggcaccaaggcaacggcaccattggtctctgggtagtgctttaagaatgaacacaatcacgttatagtccatggtccatcactattcaaggatgactccctcccttcctgtctatttttgttttttacttttttacactgagtttctatttagacactacaacatatggggtgtttgttcccattggatgcatttctatcaaaactctatcaaatgtgatggctagattctaacatattgccatgtgtggagtgtgctgaacacacaccagtttacaggaaagatgcattttgtgtacagtaaacggtgtatataccttttgttaccacagagttttttaaacaaatgagtattataggactttcttctaaatgagctaaataagtcaccattgacttcttggtgctgttgaaaataatccattttcactaaaagtgtgtgaaacctacagcatattcttcacgcagagattttcatctattatactttatcaaagattggccatgttccacttggaaatggcatgcaaaagcaatcatagagaaacctgcgtaactccatctgacaaattcaaaagagagagagagatcttgagagagaaatgctgttcgttcaaaagtggagttgttttaacagatgccaattacggtgtacagtttaacagagttttctgttgcattaggataaacattaattggagtgcagctaacatgagtatcatcagactagtatcaagtgttctaaaatgaaatatgagaagatcctgtcacaattcttagatctggtgtccagcatggatgaaacctttgagtttggtccctaaatttgcatgaaagcacaaggtaaatattcatttgcttcaggagtttcatgttggatctgtcattatcaaaagtgatcagcaatgaagaactggtcggacaaaatttaacgttgatgtaatggaattccagatgtaggcattccccccaggtcttttcatgtgcagattgcagttctgattcatttgaataaaaaggaacttggaaaa

SEQ ID NO: 1110 - DNA, 3973 bp, Homo sapiens
ggatggtgccttgagtgaatgacccccttggagaacattcttccgcatccctcgcctcaagccagcctcagacagaaaactgaagattcagcagatccagtgcttcctgctcctcttctgcccaggaacacgcttgccttccccaaggcttccagaagctctgaggcaggaggcaccaagttctacctcatgtttggaggatcttgctagctatggccctcgtactcggctccctgttgctgctggggctgtgcgggaactccttttcaggagggcagccttcatccacagatgctcctaaggcttggaattatgaattgcctgcaacaaattatgagacccaagactcccataaagctggacccattggcattctctttgaactagtgcatatctttctctatgtggtacagccgcgtgatttcccagaagatactttgagaaaattcttacagaaggcatatgaatccaaaattgattatgacaagccagaaactgtaatcttaggtctaaagattgtctactatgaagcagggattattctatgctgtgtcctggggctgctgtttattattctgatgcctctggtggggtatttcttttgtatgtgtcgttgctgtaacaaatgtggtggagaaatgcaccagcgacagaaggaaaatgggcccttcctgaggaaatgctttgcaatctccctgttggtgatttgtataataataagcattggcatcttctatggttttgtggcaaatcaccaggtaagaacccggatcaaaaggagtcggaaactggcagatagcaatttcaaggacttgcgaactctcttgaatgaaactccagagcaaatcaaatatatattggcccagtacaacactaccaaggacaaggcgttcacagatctgaacagtatcaattcagtgctaggaggcggaattcttgaccgactgagacccaacatcatccctgttcttgatgagattaagtccatggcaacagcgatcaaggagaccaaagaggcgttggagaacatgaacagcaccttgaagagcttgcaccaacaaagtacacagcttagcagcagtctgaccagcgtgaaaactagcctgcggtcatctctcaatgaccctctgtgcttggtgcatccatcaagtgaaacctgcaacagcatcagattgtctctaagccagctgaatagcaaccctgaactgaggcagcttccacccgtggatgcagaacttgacaacgttaataacgttcttaggacagatttggatggcctggtccaacagggctatcaatcccttaatgatatacctgacagagtacaacgccaaaccacgactgtcgtagcaggtatcaaaagggtcttgaattccattggttcagatatcgacaatgtaactcagcgtcttcctattcaggatatactctcagcattctctgtttatgttaataacactgaaagttacatccacagaaatttacctacattggaagagtatgattcatactggtggctgggtggcctggtcatctgctctctgctgaccctcatcgtgattttttactacctgggcttactgtgtggcgtgtgcggctatgacaggcatgccaccccgaccacccgaggctgtgtctccaacaccggaggcgtcttcctcatggttggagttggattaagtttcctcttttgctggatattgatgatcattgtggttcttacctttgtctttggtgcaaatgtggaaaaactgatctgtgaaccttacacgagcaaggaattattccgggttttggatacaccctacttactaaatgaagactgggaatactatctctctgggaagctatttaataaatcaaaaatgaagctcacttttgaacaagtttacagtgactgcaaaaaaaatagaggcacttacggcactcttcacctgcagaacagcttcaatatcagtgaacatctcaacattaatgagcatactggaagcataagcagtgaattggaaagtctgaaggtaaatcttaatatctttctgttgggtgcagcaggaagaaaaaaccttcaggattttgctgcttgtggaatagacagaatgaattatgacagctacttggctcagactggtaaatcccccgcaggagtgaatcttttatcatttgcatatgatctagaagcaaaagcaaacagtttgcccccaggaaatttgaggaactccctgaaaagagatgcacaaactattaaaacaattcaccagcaacgagtccttcctatagaacaatcactgagcactctataccaaagcgtcaagatacttcaacgcacagggaatggattgttggagagagtaactaggattctagcttctctggattttgctcagaacttcatcacaaacaatacttcctctgttattattgaggaaactaagaagtatgggagaacaataataggatattttgaacattatctgcagtggatcgagttctctatcagtgagaaagtggcatcgtgcaaacctgtggccaccgctctagatactgctgttgatgtctttctgtgtagctacattatcgaccccttgaatttgttttggtttggcataggaaaagctactgtatttttacttccggctctaatttttgcggtaaaactggctaagtactatcgtcgaatggattcggaggacgtgtacgatgatgttgaaactatacccatgaaaaatatggaaaatggtaataatggttatcataaagatcatgtatatggtattcacaatcctgttatgacaagcccatcacaacattgatagctgatgttgaaactgcttgagcatcaggatactcaaagtggaaaggatcacagatttttggtagtttctgggtctacaaggactttccaaatccaggagcaacgccagtggcaacgtagtgactcaggcgggcaccaaggcaacggcaccattggtctctgggtagtgctttaagaatgaacacaatcacgttatagtccatggtccatcactattcaaggatgactccctcccttcctgtctatttttgttttttacttttttacactgagtttctatttagacactacaacatatggggtgtttgttcccattggatgcatttctatcaaaactctatcaaatgtgatggctagattctaacatattgccatgtgtggagtgtgctgaacacacaccagtttacaggaaagatgcattttgtgtacagtaaacggtgtatataccttttgttaccacagagttttttaaacaaatgagtattataggactttcttctaaatgagctaaataagtcaccattgacttcttggtgctgttgaaaataatccattttcactaaaagtgtgtgaaacctacagcatattcttcacgcagagattttcatctattatactttatcaaagattggccatgttccacttggaaatggcatgcaaaagcaatcatagagaaacctgcgtaactccatctgacaaattcaaaagagagagagagatcttgagagagaaatgctgttcgttcaaaagtggagttgttttaacagatgccaattacggtgtacagtttaacagagttttctgttgcattaggataaacattaattggagtgcagctaacatgagtatcatcagactagtatcaagtgttctaaaatgaaatatgagaagatcctgtcacaattcttagatctggtgtccagcatggatgaaacctttgagtttggtccctaaatttgcatgaaagcacaaggtaaatattcatttgcttcaggagtttcatgttggatctgtcattatcaaaagtgatcagcaatgaagaactggtcggacaaaatttaacgttgatgtaatggaattccagatgtaggcattccccccaggtcttttcatgtgcagattgcagttctgattcatttgaataaaaaggaacttggaaaa

SEQ ID NO: 1111 - DNA, 3794 bp, Homo sapiens
ccaagttctacctcatgtttggaggatcttgctagctatggccctcgtactcggctccctgttgctgctggggctgtgcgggaactccttttcaggagggcagccttcatccacagatgctcctaaggcttggaattatgaattgcctgcaacaaattatgagacccaagactcccataaagctggacccattggcattctctttgaactagtgcatatctttctctatgtggtacagccgcgtgatttcccagaagatactttgagaaaattcttacagaaggcatatgaatccaaaattgattatgacaagccagaaactgtaatcttaggtctaaagattgtctactatgaagcagggattattctatgctgtgtcctggggctgctgtttattattctgatgcctctggtggggtatttcttttgtatgtgtcgttgctgtaacaaatgtggtggagaaatgcaccagcgacagaaggaaaatgggcccttcctgaggaaatgctttgcaatctccctgttggtgatttgtataataataagcattggcatcttctatggttttgtggcaaatcaccaggtaagaacccggatcaaaaggagtcggaaactggcagatagcaatttcaaggacttgcgaactctcttgaatgaaactccagagcaaatcaaatatatattggcccagtacaacactaccaaggacaaggcgttcacagatctgaacagtatcaattcagtgctaggaggcggaattcttgaccgactgagacccaacatcatccctgttcttgatgagattaagtccatggcaacagcgatcaaggagaccaaagaggcgttggagaacatgaacagcaccttgaagagcttgcaccaacaaagtacacagcttagcagcagtctgaccagcgtgaaaactagcctgcggtcatctctcaatgaccctctgtgcttggtgcatccatcaagtgaaacctgcaacagcatcagattgtctctaagccagctgaatagcaaccctgaactgaggcagcttccacccgtggatgcagaacttgacaacgttaataacgttcttaggacagatttggatggcctggtccaacagggctatcaatcccttaatgatatacctgacagagtacaacgccaaaccacgactgtcgtagcaggtatcaaaagggtcttgaattccattggttcagatatcgacaatgtaactcagcgtcttcctattcaggatatactctcagcattctctgtttatgttaataacactgaaagttacatccacagaaatttacctacattggaagagtatgattcatactggtggctgggtggcctggtcatctgctctctgctgaccctcatcgtgattttttactacctgggcttactgtgtggcgtgtgcggctatgacaggcatgccaccccgaccacccgaggctgtgtctccaacaccggaggcgtcttcctcatggttggagttggattaagtttcctcttttgctggatattgatgatcattgtggttcttacctttgtctttggtgcaaatgtggaaaaactgatctgtgaaccttacacgagcaaggaattattccgggttttggatacaccctacttactaaatgaagactgggaatactatctctctgggaagctatttaataaatcaaaaatgaagctcacttttgaacaagtttacagtgactgcaaaaaaaatagaggcacttacggcactcttcacctgcagaacagcttcaatatcagtgaacatctcaacattaatgagcatactggaagcataagcagtgaattggaaagtctgaaggtaaatcttaatatctttctgttgggtgcagcaggaagaaaaaaccttcaggattttgctgcttgtggaatagacagaatgaattatgacagctacttggctcagactggtaaatcccccgcaggagtgaatcttttatcatttgcatatgatctagaagcaaaagcaaacagtttgcccccaggaaatttgaggaactccctgaaaagagatgcacaaactattaaaacaattcaccagcaacgagtccttcctatagaacaatcactgagcactctataccaaagcgtcaagatacttcaacgcacagggaatggattgttggagagagtaactaggattctagcttctctggattttgctcagaacttcatcacaaacaatacttcctctgttattattgaggaaactaagaagtatgggagaacaataataggatattttgaacattatctgcagtggatcgagttctctatcagtgagaaagtggcatcgtgcaaacctgtggccaccgctctagatactgctgttgatgtctttctgtgtagctacattatcgaccccttgaatttgttttggtttggcataggaaaagctactgtatttttacttccggctctaatttttgcggtaaaactggctaagtactatcgtcgaatggattcggaggacgtgtacgatgatgttgaaactatacccatgaaaaatatggaaaatggtaataatggttatcataaagatcatgtatatggtattcacaatcctgttatgacaagcccatcacaacattgatagctgatgttgaaactgcttgagcatcaggatactcaaagtggaaaggatcacagatttttggtagtttctgggtctacaaggactttccaaatccaggagcaacgccagtggcaacgtagtgactcaggcgggcaccaaggcaacggcaccattggtctctgggtagtgctttaagaatgaacacaatcacgttatagtccatggtccatcactattcaaggatgactccctcccttcctgtctatttttgttttttacttttttacactgagtttctatttagacactacaacatatggggtgtttgttcccattggatgcatttctatcaaaactctatcaaatgtgatggctagattctaacatattgccatgtgtggagtgtgctgaacacacaccagtttacaggaaagatgcattttgtgtacagtaaacggtgtatataccttttgttaccacagagttttttaaacaaatgagtattataggactttcttctaaatgagctaaataagtcaccattgacttcttggtgctgttgaaaataatccattttcactaaaagtgtgtgaaacctacagcatattcttcacgcagagattttcatctattatactttatcaaagattggccatgttccacttggaaatggcatgcaaaagccatcatagagaaacctgcgtaactccatctgacaaattcaaaagagagagagagatcttgagagagaaatgctgttcgttcaaaagtggagttgttttaacagatgccaattacggtgtacagtttaacagagttttctgttgcattaggataaacattaattggagtgcagctaacatgagtatcatcagactagtatcaagtgttctaaaatgaaatatgagaagatcctgtcacaattcttagatctggtgtccagcatggatgaaacctttgagtttggtccctaaatttgcatgaaagcacaaggtaaatattcatttgcttcaggagtttcatgttggatctgtcattatcaaaagtgatcagcaatgaagaactggtcggacaaaatttaacgttgatgtaatggaattccagatgtaggcattccccccaggtcttttcatgtgcagattgcagttctgattcatttgaataaaaaggaacttgg

SEQ ID NO: 1112 - DNA, 2512 bp, Homo sapiens
ggggcgggtccagtcccgggcgggccgtcgcgggagaggtgctaacggatggaagggttgtttctacctgttggccattgtggatgatgttgctatgcatattgggaaataacatctgctttgctgccgagctcagaggagaccccagacccctcccgcagccagagggctggagcctgctcagaggtgctttgaagatgccggaggccccgcctctgctgttggcagctgtgttgctgggcctggtgctgctggtggtgctgctgctgcttctgaggcactggggctggggcctgtgccttatcggctggaacgagttcatcctgcagcccatccacaacctgctcatgggtgacaccaaggagcagcgcatcctgaaccatgtgctgcagcatgcggagcccgggaacgcacagagcgtgctggaggccattgacacctactgcgagcagaaggagtgggccatgaacgtgggcgacaagaaaggcaagatcgtggacgccgtgattcaggagcaccagccctccgtgctgctggagctgggggcctactgtggctactcagctgtgcgcatggcccgcctgctgtcaccaggggcgaggctcatcaccatcgagatcaaccccgactgtgccgccatcacccagcggatggtggatttcgctggcatgaaggacaaggtcacccttgtggttggagcgtcccaggacatcatcccccagctgaagaagaagtatgatgtggacacactggacatggtcttcctcgaccactggaaggaccggtacctgccggacacgcttctcttggaggaatgtggcctgctgcggaaggggacagtgctactggctgacaacgtgatctgcccaggtgcgccagacttcctagcacacgtgcgcgggagcagctgctttgagtgcacacactaccaatcgttcctggaatacagggaggtggtggacggcctggagaaggccatctacaagggcccaggcagcgaagcagggccctgactgccccccccggccccctgacatgctaacctctctgaactgcaacactggattgttcttttttaagactcaatcatgacttctttactaacactggctagctatattatcttatatactaatatcatgttttaaaaatataaaatagaaattaagaatctaaatatttagatataactcgacttagtacatccttctcaactgccattcccctgctgcccttgacttgggcaccaaacattcaaagctccccttgacggacgctaacgctaagggcggggcccctagctggctgggttctgggtggcacgcctggcccactggcctcccagccacagtggtgcagaggtcagccctcctgcagctaggccaggggcacctgttagccccatggggacgactgccagcctgggaaacgaagaggagtcagccagcattcacacctttctgaccaagcaggcgctggggacaggtggaccccgcagcagcaccagcccctctgggccccatgtggcacagagtggaagcatctccttccctactccccactgggccttgcttacagaagaggcaatggctcagaccagctcccgcatccctgtagttgcctccctggcccatgagtgaggatgcagtgctggtttctgtccacctacacctagagctgtccccatctcctccaaggggtcagactgctagccacctcagaggctccaagggcccagttcccaggcccaggacaggaatcaaccctgtgctagctgagttcacctgcaccgagaccagcccctagccaagattctactcctgggctcaaggcctggctagcccccagccagcccactcctatggatagacagaccagtgagcccaagtggacaagtttggggccacccagggaccagaaacagagcctctgcaggacacagcagatgggcacctgggaccacctccacccagggccctgccccagacgcgcagaggcccgacacaagggagaagccagccacttgtgccagacctgagtggcagaaagcaaaaagttcctttgctgctttaatttttaaattttcttacaaaaatttaggtgtttaccaatagtcttattttggcttatttttaatgctttttctcagtgtttttcttctgtttctgagtcacgaacagcaggcactgaaagcagtcccccagccactgccgaaggtcagtcccggaggtgctgcccaggctccaggcagatgcggcagccccggccacagccagcatgggctggagaaaggctctctactgcacaggggcctcacgtgactgcagggctctggggaggtggggcacctgtagcctgacccccaccttgctgcttccaaagcttccttgcccagcagcccagtcggcctcctcgggccttctgtcactcgctcacacacagcaccatgtcagtaaacagctaactcaggcctagggagttaggtaggatggggggagtggggtgggggggc

SEQ ID NO: 1113 - DNA, 2688 bp, Homo sapiens
cctggccaccgccgcgcggacaccctcacgaggacaccccggccgcgcggacacctaccgcggggacgccccgaccccatcctacctgctgcgccccgcgccgcgccccgcaccccgcccgccacggcctgcgtccgccaccggaagcgccctcctaatccccgcagcgccaccgccattgccgccatcgtcgtggggcttctggggcagctagggctgcccgccgcgctgcctgcgccggaccggggcgggtccagtcccgggcgggccgtcgcgggagagaaataacatctgctttgctgccgagctcagaggagaccccagacccctcccgcagccagagggctggagcctgctcagaggtgctttgaagatgccggaggccccgcctctgctgttggcagctgtgttgctgggcctggtgctgctggtggtgctgctgctgcttctgaggcactggggctggggcctgtgccttatcggctggaacgagttcatcctgcagcccatccacaacctgctcatgggtgacaccaaggagcagcgcatcctgaaccatgtgctgcagcatgcggagcccgggaacgcacagagcgtgctggaggccattgacacctactgcgagcagaaggagtgggccatgaacgtgggcgacaagaaaggcaagatcgtggacgccgtgattcaggagcaccagccctccgtgctgctggagctgggggcctactgtggctactcagctgtgcgcatggcccgcctgctgtcaccaggggcgaggctcatcaccatcgagatcaaccccgactgtgccgccatcacccagcggatggtggatttcgctggcatgaaggacaaggtcacccttgtggttggagcgtcccaggacatcatcccccagctgaagaagaagtatgatgtggacacactggacatggtcttcctcgaccactggaaggaccggtacctgccggacacgcttctcttggaggaatgtggcctgctgcggaaggggacagtgctactggctgacaacgtgatctgcccaggtgcgccagacttcctagcacacgtgcgcgggagcagctgctttgagtgcacacactaccaatcgttcctggaatacagggaggtggtggacggcctggagaaggccatctacaagggcccaggcagcgaagcagggccctgactgccccccccggcccccctctcgggctctctcacccagcctggtactgaaggtgccagacgtgctcctgctgaccttctgcggctccgggctgtgtcctaaatgcaaagcacacctcggccgaggcctgcgccctgacatgctaacctctctgaactgcaacactggattgttcttttttaagactcaatcatgacttctttactaacactggctagctatattatcttatatactaatatcatgttttaaaaatataaaatagaaattaagaatctaaatatttagatataactcgacttagtacatccttctcaactgccattcccctgctgcccttgacttgggcaccaaacattcaaagctccccttgacggacgctaacgctaagggcggggcccctagctggctgggttctgggtggcacgcctggcccactggcctcccagccacagtggtgcagaggtcagccctcctgcagctaggccaggggcacctgttagccccatggggacgactgccagcctgggaaacgaagaggagtcagccagcattcacacctttctgaccaagcaggcgctggggacaggtggaccccgcagcagcaccagcccctctgggccccatgtggcacagagtggaagcatctccttccctactccccactgggccttgcttacagaagaggcaatggctcagaccagctcccgcatccctgtagttgcctccctggcccatgagtgaggatgcagtgctggtttctgtccacctacacctagagctgtccccatctcctccaaggggtcagactgctagccacctcagaggctccaagggcccagttcccaggcccaggacaggaatcaaccctgtgctagctgagttcacctgcaccgagaccagcccctagccaagattctactcctgggctcaaggcctggctagcccccagccagcccactcctatggatagacagaccagtgagcccaagtggacaagtttggggccacccagggaccagaaacagagcctctgcaggacacagcagatgggcacctgggaccacctccacccagggccctgccccagacgcgcagaggcccgacacaagggagaagccagccacttgtgccagacctgagtggcagaaagcaaaaagttcctttgctgctttaatttttaaattttcttacaaaaatttaggtgtttaccaatagtcttattttggcttatttttaatgctttttctcagtgtttttcttctgtttctgagtcacgaacagcaggcactgaaagcagtcccccagccactgccgaaggtcagtcccggaggtgctgcccaggctccaggcagatgcggcagccccggccacagccagcatgggctggagaaaggctctctactgcacaggggcctcacgtgactgcagggctctggggaggtggggcacctgtagcctgacccccaccttgctgcttccaaagcttccttgcccag

SEQ ID NO: 1114 - DNA, 1289 bp, Homo sapiens
caccgccattgccgccatcgtcgtggggcttctggggcagctagggctgcccgccgcgctgcctgcgccggaccggggcgggtccagtcccgggcgggccgtcgcgggagagaaataacatctgctttgctgccgagccagaggagaccccagacccctcccgcagccagagggctggagcctgctcagaggtgctttgaagatgccggaggccccgcctctgctgttggcagctgtgttgctgggcctggtgctgctggtggtgctgctgctgcttctgaggcactggggctggggcctgtgccttatcggctggaacgagttcatcctgcagcccatccacaacctgctcatgggtgacaccaaggagcagcgcatcctgaaccacgtgctgcagcatgcggagcccgggaacgcacagagcgtgctggaggccattgacacctactgcgagcagaaggagtgggccatgaacgtgggcgacaagaaaggcaagatcgtggacgccgtgattcaggagcaccagccctccgtgctgctggagctgggggcctactgtggctactcagctgtgcgcatggcccgcctgctgtcaccaggggcgaggctcatcaccatcgagatcaaccccgactgtgccgccatcacccagcggatggtggatttcgctggcgtgaaggacaaggtcacccttgtggttggagcgtcccaggacatcatcccccagctgaagaagaagtatgatgtggacacactggacatggtcttcctcgaccactggaaggaccggtacctgccggacacgcttctcttggaggaatgtggcctgctgcggaaggggacagtgctactggctgacaacgtgatctgcccaggtgcgccagacttcctagcacacgtgcgcgggagcagctgctttgagtgcacacactaccaatcgttcctggaatacagggaggtggtggacggcctggagaaggccatctacaagggcccaggcagcgaagcagggccctgactgcccccccggcccccctctcgggctctctcacccagcctggtactgaaggtgccagacgtgctcctgctgaccttctgcggctccgggctgtgtcctaaatgcaaagcacacctcggccgaggcctgcgccctgacatgctaacctctctgaactgcaacactggattgttcttttttaagactcaatcatgacttctttactaacactggctagctatattatcttatatactaatatcatgttttaaaaatataaaatagaaattaa

SEQ ID NO: 1115 - DNA, 2805 bp, Homo sapiens
cctggccaccgccgcgcggacaccctcacgaggacaccccggccgcgcggacacctaccgcggggacgccccgaccccatcctacctgctgcgccccgcgccgcgccccgcaccccgcccgccacggcctgcgtccgccaccggaagcgccctcctaatccccgcagcgccaccgccattgccgccatcgtcgtggggcttctggggcagctagggctgcccgccgcgctgcctgcgccggaccggggcgggtccagtcccgggcgggccgtcgcgggagagaaataacatctgctttgctgccgagctcagaggagaccccagacccctcccgcagccagagggctggagcctgctcagaggtgctttgaagatgccggaggccccgcctctgctgttggcagctgtgttgctgggcctggtgctgctggtggtgctgctgctgcttctgaggcactggggctggggcctgtgccttatcggctggaacgagttcatcctgcagcccatccacaacctgctcatgggtgacaccaaggagcagcgcatcctgaaccatgtgctgcagcatgcggagcccgggaacgcacagagcgtgctggaggccattgacacctactgcgagcagaaggagtgggccatgaacgtgggcgacaagaaaggcaagatcgtggacgccgtgattcaggagcaccagccctccgtgctgctggagctgggggcctactgtggctactcagctgtgcgcatggcccgcctgctgtcaccaggggcgaggctcatcaccatcgagatcaaccccgactgtgccgccatcacccagcggatggtggatttcgctggcatgaaggacaaggtcacccttgtggttggagcgtcccaggacatcatcccccagctgaagaagaagtatgatgtggacacactggacatggtcttcctcgaccactggaaggaccggtacctgccggacacgcttctcttggaggaatgtggcctgctgcggaaggggacagtgctactggctgacaacgtgatctgcccaggtgcgccagacttcctagcacacgtgcgcgggagcagctgctttgagtgcacacactaccaatcgttcctggaatacagggaggtggtggacggcctggagaaggccatctacaagggcccaggcagcgaagcagggccctgactgccccccccggcccccctctcgggctctctcacccagcctggtactgaaggtgccagacgtgctcctgctgaccttctgcggctccgggctgtgtcctaaatgcaaagcacacctcggccgaggcctgcgccctgacatgctaacctctctgaactgcaacactggattgttcttttttaagactcaatcatgacttctttactaacactggctagctatattatcttatatactaatatcatgttttaaaaatataaaatagaaattaagaatctaaatatttagatataactcgacttagtacatccttctcaactgccattcccctgctgcccttgacttgggcaccaaacattcaaagctccccttgacggacgctaacgctaagggcggggcccctagctggctgggttctgggtggcacgcctggcccactggcctcccagccacagtggtgcagaggtcagccctcctgcagctaggccaggggcacctgttagccccatggggacgactgccagcctgggaaacgaagaggagtcagccagcattcacacctttctgaccaagcaggcgctggggacaggtggaccccgcagcagcaccagcccctctgggccccatgtggcacagagtggaagcatctccttccctactccccactgggccttgcttacagaagaggcaatggctcagaccagctcccgcatccctgtagttgcctccctggcccatgagtgaggatgcagtgctggtttctgtccacctacacctagagctgtccccatctcctccaaggggtcagactgctagccacctcagaggctccaagggcccagttcccaggcccaggacaggaatcaaccctgtgctagctgagttcacctgcaccgagaccagcccctagccaagattctactcctgggctcaaggcctggctagcccccagccagcccactcctatggatagacagaccagtgagcccaagtggacaagtttggggccacccagggaccagaaacagagcctctgcaggacacagcagatgggcacctgggaccacctccacccagggccctgccccagacgcgcagaggcccgacacaagggagaagccagccacttgtgccagacctgagtggcagaaagcaaaaagttcctttgctgctttaatttttaaattttcttacaaaaatttaggtgtttaccaatagtcttattttggcttatttttaatgctttttctcagtgtttttcttctgtttctgagtcacgaacagcaggcactgaaagcagtcccccagccactgccgaaggtcagtcccggaggtgctgcccaggctccaggcagatgcggcagccccggccacagccagcatgggctggagaaaggctctctactgcacaggggcctcacgtgactgcagggctctggggaggtggggcacctgtagcctgacccccaccttgctgcttccaaagcttccttgcccagcagcccagtcggcctcctcgggccttctgtcactcgctcacacacagcaccatgtcagtaaacagctaactcaggcctagggagttaggtaggatggggggagtggggtgggggggc

SEQ ID NO: 1116 - DNA, 1067 bp, Homo sapiens
gctgttggcagctgtgttgctgggcctggtgctgctggtggtgctgctgctgcttctgaggcactggggctggggcctgtgccttatcggctggaacgagttcatcctgcagcccatccacaacctgctcatgggtgacaccaaggagcagcgcatcctgaaccacgtgctgcagcatgcggagcccgggaacgcacagagcgtgctggaggccattgacacctactgcgagcagaaggagtgggccatgaacgtgggcgacaagaaaggcaagatcgtggacgccgtgattcaggagcaccagccctccgtgctgctggagctgggggcctactgtggctactcagctgtgcgcatggcccgcctgctgtcaccaggggcgaggctcatcaccatcgagatcaaccccgactgtgccgccatcacccagcggatggtggatttcgctggcgtgaaggacaaggtcacccttgtggttggagcgtcccaggacatcatcccccagctgaagaagaagtatgatgtggacacactggacatggtcttcctcgaccactggaaggaccggtacctgccggacacgcttctcttggaggaatgtggcctgctgcggaaggggacagtgctactggctgacaacgtgatctgcccaggtgcgccagacttcctagcacacgtgcgcgggagcagctgctttgagtgcacacactaccaatcgttcctggaatacagggaggtggtggacggcctggagaaggccatctacaagggcccaggcagcgaagcagggccctgactgcccccccggcccccctctcgggctctctcacccagcctggtactgaaggtgccagacgtgctcctgctgaccttctgcggctccgggctgtgtcctaaatgcaaagcacacctcggccgaggcctgcgccctgacatgctaacctctctgaactgcaacactggattgttcttttttaagactcaatcatgacttctttactaacactggctagctatattatcttatatactaatatcatgttttaaaaatataaaatagaaattaa

SEQ ID NO: 1117 - DNA, 6533 bp, Homo sapiens
ggttctgcgggttggcgctgagtttggaagtcgcgcgggaccccttttatagcagcgtgggcgacgtgccacacgggtgtcccagcccaggggctggtctgagctggaagaggttatgcaaataagggccccacctccacggcaggagggtgagccctaggtccagatgctcacactggcgcaggtctgtcctgagccgacacctgcacagtggcgagaccaaggacccagagagaaaggtgagagtgcagccggggaggctgaggatcggcggagctggaagagtgagggtgaaggcaagaagtagagcacagaagcaaagattttaagaggaaagaagacatctgaacccaacaccaccctaaaccacaggctgcagggttggcatgctccgtgcaagaccagaggcactgatgctcctgggagctcttctgactggatccctgggtccatcgggcaatcaggacgcactctcactgccctgggaagtgcagcgctatgacggctggtttaacaacctgaggcaccacgagcgtggtgctgttggctgccggttgcagcgccgcgtaccagccaattacgccgacggtgtgtatcaggctctggaggagccgcagctgcccaacccgcgccggctcagcaacgcagccacgcggggcatagccggcctgccgtcgctccacaaccgcaccgtactgggggtcttctttggctaccatgttctttccgacgtggtgagcgtggaaacgcccggttgccccgccgagttcctcaacatccgcatcccacctggagaccccgtgttcgaccccgaccagcgcggggacgtggtgctgcccttccagaggagccgctgggaccccgagaccggacggagtcccagcaacccccgggacctggccaaccaggtgacgggctggctggacggcagcgccatctatggctcctcgcactcctggagcgacgcgctgcggagcttctcggggggacagctggcgtcggggcccgaccccgctttcccccgagactcgcagaaccccctgctcatgtgggcggcgcccgaccccgccaccgggcagaacgggccccgggggctgtacgccttcggggcagagagagggaaccgggaacccttcctgcaggcgctgggcctgctctggttccgctaccacaacctgtgggcgcagaggctggcccgccagcacccagactgggaggacgaggagctgttccagcacgcacgcaagagggtcatcgccacctaccagaacatcgctgtgtatgagtggctgcccagcttcctgcagaaaacactcccggagtatacaggataccgtcctttcctagaccccagcatctccccggaatttgtggtggcctctgagcagttcttctctaccatggtgccccctggtgtctacatgagaaatgccagctgtcatttccggaaggtcctgaacaagggttttcaaagctcccaagctctcagggtctgcaacaactactggattcgggagaaccccaatctgaacagtacccaggaggtgaatgagctgctgctgggaatggcctcccagatttcggagttggaggacaacatagtggttgaagatctgagggattactggcctggccctggcaaattctcccgtacagactatgtggccagcagcatccaacgtggccgagatatggggctgcccagctatagccaggccctgctggcctttgggctggacatcccaaggaactggagtgatctcaaccctaatgtggacccccaggtgctggaggccacagctgccctgtacaaccaggacctatcccagctagagctgctccttggcgggctcctggagagccatggggaccctggacccctgttcagtgccattgtcctcgaccagtttgtacggctgcgggatggtgaccgctactggtttgagaacaccaggaatgggctgttctccaagaaggagattgaagacatccgaaataccaccctgcgggacgtgctggtcgctgttatcaacattgaccccagtgccctgcagcccaatgtctttgtctggcataaaggtgcaccctgccctcaacctaagcagctcacaactgacggcctgccccagtgtgcacccctgactgtgcttgacttctttgaaggcagcagccctggttttgccatcaccatcattgctctctgctgccttcccttagtgagtctgcttctctctggagtggtggcctatttccggggccgagaacacaagaagctacaaaagaaactcaaagagagcgtgaagaaggaagcagccaaagatggagtgccagcgatggagtggccaggccccaaggagaggagcagtcccatcatcatccagctgctgtcagacaggtgtctgcaggtcctgaacaggcatctcactgtgctccgtgtggtccagctgcagcctctgcagcaggtcaacctcatcctgtccaacaaccgaggatgccgcaccctgctgctcaagatccctaaggagtatgacctggtgctgctgtttagttctgaagaggaacggggcgcctttgtgcagcagctatgggacttctgcgtgcgctgggctctgggcctccatgtggctgagatgagcgagaaggagctatttaggaaggctgtgacaaagcagcagcgggaacgcatcctggagatcttcttcagacacctttttgctcaggtgctggacatcaaccaggccgacgcagggaccctgcccctggactcctcccagaaggtgcgggaggccctgacctgcgagctgagcagggccgagtttgccgagtccctgggcctcaagccccaggacatgtttgtggagtccatgttctctctggctgacaaggatggcaatggctacctgtccttccgagagttcctggacatcctggtggtcttcatgaaaggctccccagaggataagtcccgtctaatgtttaccatgtatgacctggatgagaatggcttcctctccaaggacgaattcttcaccatgatgcgatccttcatcgagatctccaacaactgcctgtccaaggcccagctggccgaggtggtggagtctatgttccgggagtcgggattccaggacaaggaggagctgacatgggaggattttcacttcatgctgcgggaccatgacagcgagctccgcttcacgcagctctgtgtcaaaggtggaggtggaggtggaaatggtattagagatatctttaaacaaaacatcagctgtcgagtctcgttcatcactcggacacctggggagcgctcccacccccagggactggggccccctgccccagaagccccagagctgggaggccctggactgaagaagaggtttggcaaaaaggcagcagtgcccactccccggctgtacacagaggcgctgcaagagaagatgcagcgaggcttcctagcccaaaagctgcagcagtacaagcgcttcgtggagaactaccggaggcacatcgtgtgtgtggcaatcttctcggccatctgtgttggcgtgtttgcagatcgtgcttactactatggctttgccttgccaccctcggacattgcacagaccaccctcgtgggcatcatcctgtcacgaggcacggcggccagcgtctccttcatgttctcttatatcttgctcaccatgtgccgcaacctcataaccttcctgcgagagactttcctcaaccgctatgtgccttttgatgccgcagtggacttccaccgctggatcgccatggctgctgttgtcctggccattttgcacagtgctggccacgcagtcaatgtctacatcttctcagtcagcccactcagcctgctggcctgcatattccccaacgtctttgtgaatgatgggtccaagcttccccagaagttctattggtggttcttccagaccgtcccaggtatgacaggtgtgcttctgctcctggtcctggccatcatgtatgtcttcgcctcccaccacttccgccgccgcagcttccggggcttctggctgacccaccacctctacatcctgctctatgccctgctcatcatccatggcagctatgctctgatccagctgcccactttccacatctacttcctggtcccggcaatcatctatggaggtgacaagctggtgagcctgagccggaagaaggtggagatcagcgtggtgaaggcggagctgctgccctcaggagtgacctacctgcaattccagaggccccaaggctttgagtacaagtcaggacagtgggtgcggatcgcctgcctggctctggggaccaccgagtaccaccccttcacactgacctccgcgccccatgaggacacactcagcctgcacatccgggcagtggggccctggaccactcgcctcagggagatctactcatccccaaagggcaatggctgtgctggatacccaaagctgtaccttgatggaccgtttggagagggccatcaggagtggcataaatttgaggtgtcagtgttggtgggagggggcattggggtcaccccctttgcctccatcctcaaagacctggtcttcaagtcatccttgggcagccaaatgctgtgtaagaagatctacttcatctgggtgacacggacccagcgtcagtttgagtggctggctgacatcatccaagaggtggaggagaacgaccaccaggacctggtgtctgtgcacatttatgtcacccagctggctgagaagttcgacctcaggaccaccatgctatacatctgcgagcggcacttccagaaagtgctgaaccggagtctgttcacgggcctgcgctccatcacccactttggccgtccccccttcgagcccttcttcaactccctgcaggaggtccacccacaggtgcgcaagatcggggtgttcagctgcggccctccaggaatgaccaagaatgtagagaaggcctgtcagctcgtcaacaggcaggaccgagcccacttcatgcaccactatgagaacttctgagcctgtcctccctggctgctgcttccagtatcctgccttctcttctgtgcacctaagttgcccagccctgctggcaatctctccatcagaatccaccttaggcctcagctggagggctgcagagcccctcccaatattgggagaatattgacccagacaattatacaaatgagaaaaggcaggagactatgttctacaattgcagtgcatgatgattataagtccacctgtttatcaacggcaccattcctgcagccctccagacttcctgcccttagcaagtgcgcaaccagtcaggatctcccaaagaagataaagaccactcctcaccccagctcaagccatggcaggcgtggcaagcaaagtggggaggagacagtccctgcttgtgacaagtgtggaggtgaaaaggtacaatagtgcttgtctccgatagctccccacatctctaattgacttccacaaaatcgatgcgttgctttggtatttgcttggactgacatttgagggaggaggaggctgggatcctctggctgagaatctcctcagagcccagtgcagaagctgtgatgcttagaacctggacagcccgactgcctcaactctgtctccaggtctattccctccagctccaaaaggagcagccctacttctaccccttcccgtccccaaagtgtcagcaactttgaggagggcaccaggaaacaaagatgcctccccagccctgatattcttgatgtcaccagtgatacccactgccctgacccctgggcaggcccctctctgcatctactggagtggtccctgggctctggggctgaaggattccagcctctctgccagatattcagtactcgatctcaattcccctcttccacaagagttgggtgaccagctgtcctagtttgcccaggactctccctgttttagcactgaaagtctcttgccccaggaaaccccatcagtcccaggcagattgggacagctggtcaccttacgcaagagccaggctgaaacatcccctccatactcagctctttaacttttcttttcctttttcatcgggctctttcctaaaaagctgagctgtaaaatattttacatcgaggtataataaataatcatgtacatgttttaccaccacccaggtcaagacatagaatgtttcaacatttccatcaccccagaaactccccttgtacccccttccacttcgtctcccctagctcctagaagcaaccactgatgtgatttctaccaaatccagttttggtcctactaaatatactcttttgagactggcctcttttactcaccataatgcctttgtaattcatccatgctgttgtgtgtatcagcagtttgttccttttcattgctgagtagtattctattgtagagatgtaccacagtttgtttattcttctgttgatggacgtttgggttgtttctaattttgaatgattataaataaaaattctgtgagtgttcttgtaccta

SEQ ID NO: 1118 - DNA, 2145 bp, Homo sapiens
tgaccgtttccgcttccgtccacttggcgagtgagacgctgatgggaggatggacatactggtgtctgagtgctccgcgcggctgctgcagcaggaagaagagattaaatctctgactgctgaaattgaccggttgaaaaactgtggctgtttaggagcttctccaaatttggagcagttacaagaagaaaatttaaaattaaagtatcgactgaatattcttcgaaagagtcttcaggcagaaaggaacaaaccaactaaaaatatgattaacattattagccgcctacaagaggtctttggtcatgcaattaaggctgcatatccagatttggaaaatcctcctctgctagtgacaccaagtcagcaggccaagtttggggactatcagtgtaatagtgctatgggtatttctcagatgctcaaaaccaaggaacagaaagttaatccaagagaaattgctgaaaacattaccaaacacctcccagacaatgaatgtattgaaaaagttgaaattgctggtcctggttttattaatgtccacttaagaaaggattttgtatcagaacaattgaccagtcttctagtgaatggagttcaactacctgctctgggagagaataaaaaggttatagttgacttttcctcccctaatatagctaaagagatgcatgtaggccacctgaggtcaactatcataggagagagtataagccgcctctttgaatttgcagggtatgacgtgctcaggttaaatcatgtaggagactgggggacccagtttggcatgctcatcgctcacctgcaagacaaatttccagattatctaacagtttcacctcctattggggatcttcaggtcttttataaggaatctaagaagaggtttgatactgaggaggaatttaagaagcgagcatatcagtgtgtagttctgctccagggtaaaaacccagatattacaaaagcttggaagcttatctgtgatgtctcccgccaagagttaaataaaatctatgatgcattggacgtctctttaatagagagaggggaatccttctatcaagataggatgaatgatattgtaaaggaatttgaagatagaggatttgtgcaggtggatgatggcagaaagattgtatttgtcccagggtgttccataccattaaccatagtaaaatcagatggaggttatacctatgatacatctgacctggctgctattaaacaaagactatttgaggaaaaagcagatatgattatctatgttgtggacaatggacaatctgtgcacttccagacaatatttgctgctgctcaaatgattggttggtatgaccctaaagtaactcgagtcttccatgctggatttggtgtggtgctaggggaagacaagaaaaagtttaaaacacgttcgggtgaaacagtgcgcctcatggatcttctgggagaaggactaaaacgatccatggacaagttgaaggaaaaagaaagagacaaggtcttaactgcagaggaattgaatgctgctcagacatccgttgcatatggctgcatcaaatatgctgacctttcccataaccggttgaatgactacatcttctcctttgacaaaatgctagatgacagaggaaatacagctgcttacttgttgtatgccttcactagaatcaggtctattgcacgtctggccaatattgatgaagaaatgctccaaaaagctgctcgagaaaccaagattcttttggatcatgagaaggaatggaaactaggccggtgcattttacggttccctgagattctgcaaaagattttagatgacttatttctccacactctctgtgattatatatatgagctggcaactgctttcacagagttctatgatagctgctactgtgtggagaaagatagacagactggaaaaatattgaaggtgaacatgtggcgtatgctgctatgtgaagcagtagctgctgtcatggccaaggggtttgatatcctgggaataaaacctgtccaaaggatgtaatccttcataggtttgaacactgtgtgtttttaccaaagtggccattggcactgtttgcttttttacaatcatgtggacacaagcataagtaaagaaaatttgtcaaccaggca

SEQ ID NO: 1119 - DNA, 2154 bp, Homo sapiens
tccgcttccgtccacttggcgagtgagacgctgatgggaggatggacgtactggtgtctgagtgctccgcgcggctgctgcagcaggaagaagagattaaatctctgactgctgaaattgaccggttgaaaaactgtggctgtttaggagcttctccaaatttggagcagttacaagaagaaaatttaaaattaaagtatcgactgaatattcttcgaaagagtcttcaggcagaaaggaacaaaccaactaaaaatatgattaacattattagccgcctacaagaggtctttggtcatgcaattaaggctgcatatccagatttggaaaatcctcctctgctagtgacaccaagtcagcaggccaagtttggggactatcagtgtaatagtgctatgggtatttctcagatgctcaaaaccaaggaacagaaagttaatccaagagaaattgctgaaaacattaccaaacacctcccagacaatgaatgtattgaaaaagttgaaattgctggtcctggttttattaatgtccacttaagaaaggattttgtatcagaacaattgaccagtcttctagtgaatggagttcaactacctgctctgggagagaataaaaaggttatagttgacttttcctcccctaatatagctaaagagatgcatgtaggccacctgaggtcaactatcataggagagagtataagccgcctctttgaatttgcagggtatgacgtgctcaggttaaatcatgtaggagactgggggacccagtttggcatgctcatcgctcacctgcaagacaaatttccagattatctaacagtttcacctcctattggggatcttcaggtcttttataaggaatctaagaagaggtttgatactgaggaggaatttaagaagcgagcatatcagtgtgtagttctgctccagggtaaaaacccagatattacaaaagcttggaagcttatctgtgatgtctcccgccaagagttaaataaaatctatgatgcattggacgtctctttaatagagagaggggaatccttctatcaagataggatgaatgatattgtaaaggaatttgaagatagaggatttgtgcaggtggatgatggcagaaagattgtatttgtcccagggtgttccataccattaaccatagtaaaatcagatggaggttatacctatgatacatctgacctggctgctattaaacaaagactatttgaggaaaaagcagatatgattatctatgttgtggacaatggacaatctgtgcacttccagacaatatttgctgctgctcaaatgattggttggtatgaccctaaagtaactcgagtcttccatgctggatttggtgtggtgctaggggaagacaagaaaaagtttaaaacacgttcgggtgaaacagtgcgcctcatggatcttctgggagaaggactaaaacgatccatggacaagttgaaggaaaaagaaagagacaaggtcttaactgcagaggaattgaatgctgctcagacatccgttgcgtatggctgcatcaaatatgctgacctttcccataaccggttgaatgactacatcttctcctttgacaaaatgctagatgacagaggaaatacagctgcttacttgttgtatgccttcactagaatcaggtctattgcacgtctggccaatattgatgaagaaatgctccaaaaagctgctcgagaaaccaagattcttttggatcatgagaaggaatggaaactaggccggtgcattttacggttccctgagattctgcaaaagattttagatgacttatttctccacactctctgtgattatatatatgagctggcaactgctttcacagagttctatgatagctgctactgtgtggagaaagatagacagactggaaaaatattgaaggtgaacatgtggcgtatgctgctatgtgaagcagtagctgctgtcatggccaaggggtttgatatcctgggaataaaacctgtccaaaggatgtaatccttcataggtttgaacactgtgtgtttttaccaaagtggccattggcactgtttgcttttttacaatcatgtggacacaagcataagtaaagaaaatttgtcaaccaggcaaaaaaaaaaaaaaaaaa

SEQ ID NO: 1120 - DNA, 4080 bp, Homo sapiens
ttgattctgggcactgatagcagtacttggctgcagacactcgttccaaacaggccccatttttccatctctgctgctgttattaggggagcccttagactctcttgcagcgccggaataggcggtcaagacgtgtgttaatattgcaacagcaaatataatgaatctgcagttggggacgctgaggccggagtggtggatgaaaggtggccggagccttttccacgggtccaaaccacctgttacaggagaaggcgagcggcctcgctaagcaactggacgttccgcgggcggggcggggccggggcccgagtccgctcggaaactttcgctgtgggcgagccggacccgccttctggcccctcgggcccaaccacgcaggggtagtgccgggccgcagctaggcgaggcgcaccgtgattggcggagatgtggagtgattggcggctacaccggccactcagcaggccgagctggcgccgcatccggggggccgcgtctggagtggagggaggccgaaggccccgcccctgccccgccccctcgtgcagaaggccgcgctagccggctcttcagcagcgagtgcagattgctcccccgcggccgcaggatggactccaacactgctccgctgggcccctcctgcccacagcccccgccagcaccgcagccccaggcgcgttcccgactcaatgccacagcctcgttggagcaggagaggagcgaaaggccccgagcacccggaccccaggctggccctggccctggtgttagagacgcagcggcccccgctgaaccccaggcccagcataccaggagccgggaaagagcagacggcaccgggcctacaaagggagacatggaaatcccctttgaagaagtcctggagagggccaaggccggggaccccaaggcacagactgaggtggggaagcactacctgcagttggccggcgacacggatgaagaactcaacagctgcaccgctgtggactggctggtcctcgccgcgaagcagggccgtcgcgaggctgtgaagctgcttcgccggtgcttggcggacagaagaggcatcacgtccgagaacgaacgggaggtgaggcagctctcctccgagaccgacctggagagggccgtgcgcaaggcagccctggtcatgtactggaagctcaaccccaagaagaagaagcaggtggccgtggcggagctgctggagaatgtcggccaggtcaacgagcacgatggaggggcgcagccaggccccgtgcccaagtccctgcagaagcagaggcgcatgctggagcgcctggtcagcagcgagtccaagaactacatcgcgctggatgactttgtggagatcactaagaagtacgccaagggcgtcatccccagcagcctgttcctgcaggacgacgaagatgatgacgagctggcggggaagagccctgaggacctgccactgcgtctgaaggtggtcaagtaccccctgcacgccatcatggagatcaaggagtacctgattgacatggcctccagggcaggcatgcactggctgtccaccatcatccccacgcaccacatcaacgcgctcatcttcttcttcatcatcagcaacctcaccatcgacttcttcgccttcttcatcccgctggtcatcttctacctgtccttcatctccatggtgatctgcaccctcaaggtgttccaggacagcaaggcctgggagaacttccgcaccctcaccgacctgctgctgcgcttcgagcccaacctggatgtggagcaggccgaggttaacttcggctggaaccacctggagccctatgcccatttcctgctctctgtcttcttcgtcatcttctccttccccatcgccagcaaggactgcatcccctgctcggagctggctgtcatcaccggcttctttaccgtgaccagctacctgagcctgagcacccatgcagagccctacacgcgcagggccctggccaccgaggtcaccgccggcctgctatcgctgctgccctccatgcccttgaattggccctacctgaaggtccttggccagaccttcatcaccgtgcctgtcggccacctggtcgtcctcaacgtcagcgtcccgtgcctgctctatgtctacctgctctatctcttcttccgcatggcacagctgaggaatttcaagggcacctactgctaccttgtgccctacctggtgtgcttcatgtggtgtgagctctccgtggtcatcctgctggagtccaccggcctggggctgctccgcgcctccatcggctacttcctcttcctctttgccctccccatcctggtggccggcctggccctggtgggcgtgctgcagttcgcccggtggttcacgtctctggagctcaccaagatcgcagtcaccgtggcggtctgtagtgtgcccctgctgttgcactggtggaccaaggccagcttctctgtggtggggatggtgaagtccctgacgcggagctccatggtcaagctcatcctggtgtggctcacggccatcgtgctgttctgctggttctatgtgtaccgctcagagggcatgaaggtctacaactccacactgacctggcagcagtatggtgcgctgtgcgggccacgcgcctggaaggagaccaacatggcgcgcacccagatcctctgcagccacctggagggccacagggtcacgtggaccggccgcttcaagtacgtccgcgtgactgacatcgacaacagcgccgagtctgccatcaacatgctcccgttcttcatcggcgactggatgcgctgcctctacggcgaggcctaccctgcctgcagccctggcaacacctccacggccgaggaggagctctgtcgccttaagctgctggccaagcacccctgccacatcaagaagttcgaccgctacaagtttgagattaccgtgggcatgccattcagcagcggcgctgacggctcgcgcagccgcgaggaggacgacgtcaccaaggacatcgtgctgcgggccagcagcgagttcaaaagcgtgctgctcagcctgcgccagggcagcctcatcgagttcagcaccatcctggagggccgcctgggcagcaagtggcctgtcttcgagctcaaggccatcagctgcctcaactgcatggcccagctctcgcccaccaggcggcacgtgaagatcgagcacgactggcgcagcaccgtgcatggcgccgtgaagttcgccttcgacttctttttcttcccattcctgtcggcggcctgaggatggtccgccacgaggagcttccagtgcatgttgccatgaggcctttccccagtgtggccccagcccgacaggcatgcaccagtgccgcctgtgcccacgtgtgcagactgtggctgcagagaccttgcgaccatgtgtagattgcgtggaccccgacaaagggaaggctgctgtgtagctctgtccactctgaataccaagtgtgttgggaattgcatgccatctccaccctgagcctgacctttctgagtgacatgggtgtgccaggctagactaggaggttccggtgtctggaaaagcactttacagatgagattccctctcctcccccaccttcaagcaccctgttccctctttctttcttttgtgttggatttgtttaaaaaccaaataagcatctgtgtaacctccacagtagcatttcttatttgtttggtcactgctacaccttagcagctcttcccctttcctgggggatgtgcacggcagcttgagcctgtcacgtggtcaaggcccggccccatcagaggctgggggaggcggcacattggcagtgtgtcacactgagctgggcaccacaggctgcctcatgaccctcctgtccagcaggtagtgggtgaatgtgtgaaggtcttgcctgaatccatcaggacttgggaaacagagaaccctgtgggggtggctgtgggggaggtccctgccagtgtttagaagagcctgactgtgttcagtgccttggagcagaaagccagggtcctgagtggctgaaataaaagcctctggtggaacctgca

SEQ ID NO: 1121 - DNA, 3587 bp, Homo sapiens
gtgcagaaggccgcgctagccggctcttcagcagcgagtgcagattgctcccccgcggccgcagatctcccgtttgcgccgcgttcagctgctcccgaacaacttttctgccggcccagaggccccagggcgtcgcagcgccgcgtgcggcccactcacgggccggcaggatggactccaacactgctccgctgggcccctcctgcccacagcccccgccagcaccgcagccccaggcgcgttcccgactcaatgccacagcctcgttggagcaggagaggagcgaaaggccccgagcacccggaccccaggctggccctggccctggtgttagagacgcagcggcccccgctgaaccccaggcccagcataccaggagccgggaaagagcagacggcaccgggcctacaaagggagacatggaaatcccctttgaagaagtcctggagagggccaaggccggggaccccaaggcacagactgaggtggggaagcactacctgcagttggccggcgacacggatgaagaactcaacagctgcaccgctgtggactggctggtcctcgccgcgaagcagggccgtcgcgaggctgtgaagctgcttcgccggtgcttggcggacagaagaggcatcacgtccgagaacgaacgggaggtgaggcagctctcctccgagaccgacctggagagggccgtgcgcaaggcagccctggtcatgtactggaagctcaaccccaagaagaagaagcaggtggccgtggcggagctgctggagaatgtcggccaggtcaacgagcacgatggaggggcgcagccaggccccgtgcccaagtccctgcagaagcagaggcgcatgctggagcgcctggtcagcagcgagtccaagaactacatcgcgctggatgactttgtggagatcactaagaagtacgccaagggcgtcatccccagcagcctgttcctgcaggacgacgaagatgatgacgagctggcggggaagagccctgaggacctgccactgcgtctgaaggtggtcaagtaccccctgcacgccatcatggagatcaaggagtacctgattgacatggcctccagggcaggcatgcactggctgtccaccatcatccccacgcaccacatcaacgcgctcatcttcttcttcatcatcagcaacctcaccatcgacttcttcgccttcttcatcccgctggtcatcttctacctgtccttcatctccatggtgatctgcaccctcaaggtgttccaggacagcaaggcctgggagaacttccgcaccctcaccgacctgctgctgcgcttcgagcccaacctggatgtggagcaggccgaggttaacttcggctggaaccacctggagccctatgcccatttcctgctctctgtcttcttcgtcatcttctccttccccatcgccagcaaggactgcatcccctgctcggagctggctgtcatcaccggcttctttaccgtgaccagctacctgagcctgagcacccatgcagagccctacacgcgcagggccctggccaccgaggtcaccgccggcctgctatcgctgctgccctccatgcccttgaattggccctacctgaaggtccttggccagaccttcatcaccgtgcctgtcggccacctggtcgtcctcaacgtcagcgtcccgtgcctgctctatgtctacctgctctatctcttcttccgcatggcacagctgaggaatttcaagggcacctactgctaccttgtgccctacctggtgtgcttcatgtggtgtgagctctccgtggtcatcctgctggagtccaccggcctggggctgctccgcgcctccatcggctacttcctcttcctctttgccctccccatcctggtggccggcctggccctggtgggcgtgctgcagttcgcccggtggttcacgtctctggagctcaccaagatcgcagtcaccgtggcggtctgtagtgtgcccctgctgttgcactggtggaccaaggccagcttctctgtggtggggatggtgaagtccctgacgcggagctccatggtcaagctcatcctggtgtggctcacggccatcgtgctgttctgctggttctatgtgtaccgctcagagggcatgaaggtctacaactccacactgacctggcagcagtatggtgcgctgtgcgggccacgcgcctggaaggagaccaacatggcgcgcacccagatcctctgcagccacctggagggccacagggtcacgtggaccggccgcttcaagtacgtccgcgtgactgacatcgacaacagcgccgagtctgccatcaacatgctcccgttcttcatcggcgactggatgcgctgcctctacggcgaggcctaccctgcctgcagccctggcaacacctccacggccgaggaggagctctgtcgccttaagctgctggccaagcacccctgccacatcaagaagttcgaccgctacaagtttgagattaccgtgggcatgccattcagcagcggcgctgacggctcgcgcagccgcgaggaggacgacgtcaccaaggacatcgtgctgcgggccagcagcgagttcaaaagcgtgctgctcagcctgcgccagggcagcctcatcgagttcagcaccatcctggagggccgcctgggcagcaagtggcctgtcttcgagctcaaggccatcagctgcctcaactgcatggcccagctctcgcccaccaggcggcacgtgaagatcgagcacgactggcgcagcaccgtgcatggcgccgtgaagttcgccttcgacttctttttcttcccattcctgtcggcggcctgaggatggtccgccacgaggagcttccagtgcatgtttgccgcctgtgcccacgtgtgcagactgtggctgcagagaccttgcgaccatgtgtagattgcgtggaccccgacaaagggaaggctgctgtgtagctctgtccactctgaataccaagtgtgttgggaattgcatgccatctccaccctgagcctgacctttctgagtgacatgggtgtgccaggctagactaggaggttccggtgtctggaaaagcactttacagatgagattccctctcctcccccaccttcaagcaccctgttccctctttctttcttttgtgttggatttgtttaaaaaccaaataagcatctgtgtaacctccacagtagcatttcttatttgtttggtcactgctacaccttagcagctcttcccctttcctgggggatgtgcacggcagcttgagcctgtcacgtggtcaaggcccggccccatcagaggctgggggaggcggcacattggcagtgtgtcacactgagctgggcaccacaggctgcctcatgaccctcctgtccagcaggtagtgggtgaatgtgtgaaggtcttgcctgaatccatcaggacttgggaaacagagaaccctgtgggggtggctgtgggggaggtccctgccagtgtttagaagagcctgactgtgttcagtgccttggagcagaaagccagggtcctgagtggctgaaataaaagcctctggtggaacct

SEQ ID NO: 1122 - DNA, 3640 bp, Homo sapiens
gtgcagaaggccgcgctagccggctcttcagcagcgagtgcagattgctcccccgcggccgcagatctcccgtttgcgccgcgttcagctgctcccgaacaacttttctgccggcccagaggccccagggcgtcgcagcgccgcgtgcggcccactcacgggccggcaggatggactccaacactgctccgctgggcccctcctgcccacagcccccgccagcaccgcagccccaggcgcgttcccgactcaatgccacagcctcgttggagcaggagaggagcgaaaggccccgagcacccggaccccaggctggccctggccctggtgttagagacgcagcggcccccgctgaaccccaggcccagcataccaggagccgggaaagagcagacggcaccgggcctacaaagggagacatggaaatcccctttgaagaagtcctggagagggccaaggccggggaccccaaggcacagactgaggtggggaagcactacctgcagttggccggcgacacggatgaagaactcaacagctgcaccgctgtggactggctggtcctcgccgcgaagcagggccgtcgcgaggctgtgaagctgcttcgccggtgcttggcggacagaagaggcatcacgtccgagaacgaacgggaggtgaggcagctctcctccgagaccgacctggagagggccgtgcgcaaggcagccctggtcatgtactggaagctcaaccccaagaagaagaagcaggtggccgtggcggagctgctggagaatgtcggccaggtcaacgagcacgatggaggggcgcagccaggccccgtgcccaagtccctgcagaagcagaggcgcatgctggagcgcctggtcagcagcgagtccaagaactacatcgcgctggatgactttgtggagatcactaagaagtacgccaagggcgtcatccccagcagcctgttcctgcaggacgacgaagatgatgacgagctggcggggaagagccctgaggacctgccactgcgtctgaaggtggtcaagtaccccctgcacgccatcatggagatcaaggagtacctgattgacatggcctccagggcaggcatgcactggctgtccaccatcatccccacgcaccacatcaacgcgctcatcttcttcttcatcatcagcaacctcaccatcgacttcttcgccttcttcatcccgctggtcatcttctacctgtccttcatctccatggtgatctgcaccctcaaggtgttccaggacagcaaggcctgggagaacttccgcaccctcaccgacctgctgctgcgcttcgagcccaacctggatgtggagcaggccgaggttaacttcggctggaaccacctggagccctatgcccatttcctgctctctgtcttcttcgtcatcttctccttccccatcgccagcaaggactgcatcccctgctcggagctggctgtcatcaccggcttctttaccgtgaccagctacctgagcctgagcacccatgcagagccctacacgcgcagggccctggccaccgaggtcaccgccggcctgctatcgctgctgccctccatgcccttgaattggccctacctgaaggtccttggccagaccttcatcaccgtgcctgtcggccacctggtcgtcctcaacgtcagcgtcccgtgcctgctctatgtctacctgctctatctcttcttccgcatggcacagctgaggaatttcaagggcacctactgctaccttgtgccctacctggtgtgcttcatgtggtgtgagctctccgtggtcatcctgctggagtccaccggcctggggctgctccgcgcctccatcggctacttcctcttcctctttgccctccccatcctggtggccggcctggccctggtgggcgtgctgcagttcgcccggtggttcacgtctctggagctcaccaagatcgcagtcaccgtggcggtctgtagtgtgcccctgctgttgcactggtggaccaaggccagcttctctgtggtggggatggtgaagtccctgacgcggagctccatggtcaagctcatcctggtgtggctcacggccatcgtgctgttctgctggttctatgtgtaccgctcagagggcatgaaggtctacaactccacactgacctggcagcagtatggtgcgctgtgcgggccacgcgcctggaaggagaccaacatggcgcgcacccagatcctctgcagccacctggagggccacagggtcacgtggaccggccgcttcaagtacgtccgcgtgactgacatcgacaacagcgccgagtctgccatcaacatgctcccgttcttcatcggcgactggatgcgctgcctctacggcgaggcctaccctgcctgcagccctggcaacacctccacggccgaggaggagctctgtcgccttaagctgctggccaagcacccctgccacatcaagaagttcgaccgctacaagtttgagattaccgtgggcatgccattcagcagcggcgctgacggctcgcgcagccgcgaggaggacgacgtcaccaaggacatcgtgctgcgggccagcagcgagttcaaaagcgtgctgctcagcctgcgccagggcagcctcatcgagttcagcaccatcctggagggccgcctgggcagcaagtggcctgtcttcgagctcaaggccatcagctgcctcaactgcatggcccagctctcgcccaccaggcggcacgtgaagatcgagcacgactggcgcagcaccgtgcatggcgccgtgaagttcgccttcgacttctttttcttcccattcctgtcggcggcctgaggatggtccgccacgaggagcttccagtgcatgttgccatgaggcctttccccagtgtggccccagcccgacaggcatgcaccagtgccgcctgtgcccacgtgtgcagactgtggctgcagagaccttgcgaccatgtgtagattgcgtggaccccgacaaagggaaggctgctgtgtagctctgtccactctgaataccaagtgtgttgggaattgcatgccatctccaccctgagcctgacctttctgagtgacatgggtgtgccaggctagactaggaggttccggtgtctggaaaagcactttacagatgagattccctctcctcccccaccttcaagcaccctgttccctctttctttcttttgtgttggatttgtttaaaaaccaaataagcatctgtgtaacctccacagtagcatttcttatttgtttggtcactgctacaccttagcagctcttcccctttcctgggggatgtgcacggcagcttgagcctgtcacgtggtcaaggcccggccccatcagaggctgggggaggcggcacattggcagtgtgtcacactgagctgggcaccacaggctgcctcatgaccctcctgtccagcaggtagtgggtgaatgtgtgaaggtcttgcctgaatccatcaggacttgggaaacagagaaccctgtgggggtggctgtgggggaggtccctgccagtgtttagaagagcctgactgtgttcagtgccttggagcagaaagccagggtcctgagtggctgaaataaaagcctctggtggaacctgca

SEQ ID NO: 1123 - DNA, 3628 bp, Homo sapiens
gcgctagccggctcttcagcagcgagtgcagattgctcccccgcggccgcagatctcccgtttgcgccgcgttcagctgctcccgaacaacttttctgccggcccagaggccccagggcgtcgcagcgccgcgtgcggcccactcacgggccggcaggatggactccaacactgctccgctgggcccctcctgcccacagcccccgccagcaccgcagccccaggcgcgttcccgactcaatgccacagcctcgttggagcaggagaggagcgaaaggccccgagcacccggaccccaggctggccctggccctggtgttagagacgcagcggcccccgctgaaccccaggcccagcataccaggagccgggaaagagcagacggcaccgggcctacaaagggagacatggaaatcccctttgaagaagtcctggagagggccaaggccggggaccccaaggcacagactgaggtggggaagcactacctgcagttggccggcgacacggatgaagaactcaacagctgcaccgctgtggactggctggtcctcgccgcgaagcagggccgtcgcgaggctgtgaagctgcttcgccggtgcttggcggacagaagaggcatcacgtccgagaacgaacgggaggtgaggcagctctcctccgagaccgacctggagagggccgtgcgcaaggcagccctggtcatgtactggaagctcaaccccaagaagaagaagcaggtggccgtggcggagctgctggagaatgtcggccaggtcaacgagcacgatggaggggcgcagccaggccccgtgcccaagtccctgcagaagcagaggcggatgctggagcgcctggtcagcagcgagtccaagaactacatcgcgctggatgactttgtggagatcactaagaagtacgccaagggcgtcatccccagcagcctgttcctgcaggacgacgaagatgatgacgagctggcggggaagagccctgaggacctgccactgcgtctgaaggtggtcaagtaccccctgcacgccatcatggagatcaaggagtacctgattgacatggcctccagggcaggcatgcactggctgtccaccatcatccccacgcaccacatcaacgcgctcatcttcttcttcatcatcagcaacctcaccatcgacttcttcgccttcttcatcccgctggtcatcttctacctgtccttcatctccatggtgatctgcaccctcaaggtgttccaggacagcaaggcctgggagaacttccgcaccctcaccgacctgctgctgcgcttcgagcccaacctggatgtggagcaggccgaggttaacttcggctggaaccacctggagccctatgcccatttcctgctctctgtcttcttcgtcatcttctccttccccatcgccagcaaggactgcatcccctgctcggagctggctgtcatcaccggcttctttaccgtgaccagctacctgagcctgagcacccatgcagagccctacacgcgcagggccctggccaccgaggtcaccgccggcctgctatcgctgctgccctccatgcccttgaattggccctacctgaaggtccttggccagaccttcatcaccgtgcctgtcggccacctggtcgtcctcaatgtcagcgtcccgtgcctgctctatgtctacctgctctatctcttcttccgcatggcacagctgaggaatttcaagggcacctactgctaccttgtgccctacctggtgtgcttcatgtggtgtgagctctccgtggtcatcctgctggagtccaccggcctggggctgctccgcgcctccatcggctacttcctcttcctctttgccctccccatcctggtggccggcctggccctggtgggcgtgctgcagttcgcccggtggttcacgtctctggagctcaccaagatcgcagtcaccgtggcggtctgtagtgtgcccctgctgttgcgctggtggaccaaggccagcttctctgtggtggggatggtgaagtccctgacgcggagctccatggtcaagctcatcctggtgtggctcacggccatcgtgctgttctgctggttctatgtgtaccgctcagagggcatgaaggtctacaactccacactgacctggcagcagtatggtgcgctgtgcgggccacgcgcctggaaggagaccaacatggcgcgcacccagatcctctgcagccacctggagggccacagggtcacgtggaccggccgcttcaagtacgtccgcgtgactgacatcgacaacagcgccgagtctgccatcaacatgctcccgttcttcatcggcgactggatgcgctgcctctacggcgaggcctaccctgcctgcagccctggcaacacctccacggccgaggaggagctctgtcgccttaagctgctggccaagcacccctgccacatcaagaagttcgaccgctacaagtttgagattaccgtgggcatgccattcagcagcggcgctgacggctcgcgcagccgcgaggaggacgacgtcaccaaggacatcgtgctgcgggccagcagcgagttcaagagcgtgctgctcagcctgcgccagggcagcctcatcgagttcagcaccatcctggagggccgcctgggcagcaagtggcctgtcttcgagctcaaggccatcagctgcctcaactgcatggcccagctctcacccaccaggcggcacgtgaagatcgagcacgactggcgcagcaccgtgcatggcgccgtgaagttcgccttcgacttctttttcttcccattcctgtcggcggcctgaggatggtccgccacgaggagcttccagtgcatgttgccatgaggcctttccccagtgtggccccagcccgacaggcatgcaccagtgccgcctgtgcccacgtgtgcagactgtggctgcagagaccttgcgaccatgtgtagattgcgtggaccccgacaaagggaaggctgctgtgtagctctgtccactctgaataccaagtgtgttgggaattgcatgccatctccaccctgagcctgacctttctgagtgacatgggtgtgccaggctagactaggaggttccggtgtctggaaaagcactttacagatgagattccctctcctcccccaccttcaagcaccctgttccctctttctttcttttgtgttggatttgtttaaaaaccaaataagcatctgtgtaacctccacagtagcatttcttatttgtttggtcactgctacaccttagcagctcttcccctttcctgggggatgtgcacggcagcttgagcctgtcacgtggtcaaggcccggccccatcagaggctgggggaggcggcacattggcagtgtgtcacactgagctgggcaccacaggctgcctcatgaccctcctgtccagcaggtagtgggtgaatgtgtgaaggtcttgcctgaatccatcaggacttgggaaacagagaaccctgtgggggcggctgtgggggaggtccctgccagtgtttagaagagcctgactgtgttcagtgccttggagcagaaagccagggtcctgagtggctgaaataaaagcctctggtggaacctgca

SEQ ID NO: 1124 - DNA, 2002 bp, Homo sapiens
cccggctgggcccgagagccagcgggcgggcgggctgcggactctagcggggcctgccgggaaaggggcgggccgagcgcactgggccgaggcggggcgaagtgggggtgcttagtccgttgcggggggcggggtcgcgtctgccgcagcaacggggtgcggcagggtggggaacgcgggagcggggccagctcccaggaaagctggtctgcgagcggcccctgcccggctcccaggtccctgcgcgaccccgcccttcccgagaccccagccgggctgccgcccgcgtcccggaagctccagcctgaaccatgtttttcacttgtggcccaaatgaggccatggtggtctccgggttctgccgaagccccccagtcatggtggctggagggcgtgtctttgtcctgccctgcatccaacagatccagaggatctctctcaacacactgaccctcaatgtcaagagtgaaaaggtttacactcgccatggggtccccatctcagtcactggcattgcccaggtaaaaatccaggggcagaacaaggagatgttggcggccgcctgtcagatgttcctggggaagacggaggctgagattgcccacattgccctggagacgttagagggccaccagagggccatcatggcccacatgactgtggaggagatctataaggacaggcagaaattctcagaacaggttttcaaagtggcctcctcagacctggtcaacatgggcatcagtgtggttagctacactctgaaggacattcacgatgaccaggactatttgcactctttggggaaggctcgaacagctcaagtccaaaaagatgcacggattggagaagcagaggccaagagagatgctgggatccgggaagctaaagccaagcaggaaaaggtgtctgctcagtacctgagtgagatcgagatggccaaggcacagagagattacgaactgaagaaggccgcctatgacatcgaggtcaacacccgccgagcacaggctgacctggcctatcagcttcaggtggccaagactaagcagcagattgaggagcagcgggtgcaggtgcaggtggtggagcgggcccagcaggtggcagtgcaggagcaggagatcgcccggcgggagaaggagctggaggcccgggtgcggaagccagcggaagcggagcgctacaagctggagcgcctagccgaggcagagaagtcccaactaattatgcaggcggaggcagaagccgcgtctgtgcggatgcgtggggaagctgaggcctttgccataggggcccgagcccgagccgaggctgagcagatggccaagaaggcagaagccttccagctgtaccaagaggctgctcagctggacatgctgctagagaagctgccccaggtggcagaggagatcagtggtcccttgacttcagccaataagatcacactggtgtccagcggcagtgggaccatgggggcagccaaagtgactggggaagtactggacattctaactcgcctgccagagagtgtggaaagactcacaggcgtgagcatctcccaggtgaatcacaagcctttgagaacagcctgagccttcagccctcacagatgcccagcctcatagctgaagttgcctgaatgatcctcctgttgcatgtaacccactggcctccctgagcatgtccattgacagtgaggtcccacccctcatctctccttgccaaatagtttgtgccttgtcttgaagggggttgctccccttgccaacctcacactgctatgattgccaactccagcggtcccatgtcagccttctgatgatcccactccaccccacctcaacttatttaacttcctaattaaatcagactgtttgagcctgttgtctagaatattttcctgaccaagactgagggatgggctggaggttttcaactttgctacccaaataaattgctgtaagtaagtactaataaaacagaagcaactggaaattaa

SEQ ID NO: 1125 - DNA, 1925 bp, Homo sapiens
cccggctgggcccgagagccagcgggcgggcgggctgcggactctagcggggcctgccgggaaaggggcgggccgagcgcactgggccgaggcggggcgaagtgggggtgcttagtccgcccttcccgagaccccagccgggctgccgcccgcgtcccggaagctccagcctgaaccatgtttttcacttgtggcccaaatgaggccatggtggtctccgggttctgccgaagccccccagtcatggtggctggagggcgtgtctttgtcctgccctgcatccaacagatccagaggatctctctcaacacactgaccctcaatgtcaagagtgaaaaggtttacactcgccatggggtccccatctcagtcactggcattgcccaggtaaaaatccaggggcagaacaaggagatgttggcggccgcctgtcagatgttcctggggaagacggaggctgagattgcccacattgccctggagacgttagagggccaccagagggccatcatggcccacatgactgtggaggagatctataaggacaggcagaaattctcagaacaggttttcaaagtggcctcctcagacctggtcaacatgggcatcagtgtggttagctacactctgaaggacattcacgatgaccaggactatttgcactctttggggaaggctcgaacagctcaagtccaaaaagatgcacggattggagaagcagaggccaagagagatgctgggatccgggaagctaaagccaagcaggaaaaggtgtctgctcagtacctgagtgagatcgagatggccaaggcacagagagattacgaactgaagaaggccgcctatgacatcgaggtcaacacccgccgagcacaggctgacctggcctatcagcttcaggtggccaagactaagcagcagattgaggagcagcgggtgcaggtgcaggtggtggagcgggcccagcaggtggcagtgcaggagcaggagatcgcccggcgggagaaggagctggaggcccgggtgcggaagccagcggaagcggagcgctacaagctggagcgcctagccgaggcagagaagtcccaactaattatgcaggcggaggcagaagccgcgtctgtgcggatgcgtggggaagctgaggcctttgccataggggcccgagcccgagccgaggctgagcagatggccaagaaggcagaagccttccagctgtaccaagaggctgctcagctggacatgctgctagagaagctgccccaggtggcagaggagatcagtggtcccttgacttcagccaataagatcacactggtgtccagcggcagtgggaccatgggggcagccaaagtgactggggaagtactggacattctaactcgcctgccagagagtgtggaaagactcacaggcgtgagcatctcccaggtgaggtctcaggttggagctgaggagaattgctaggttcctgtgttgtgtgacacagtatgcctagcatttaaccagcatccaggcctgggagtcattgatgtttattaatcactttctgtgtgccagacacagtgctaagcttctacataaatgagttgttttaaatcaaactaccattagggtatataggattttacaaagtccagaaactcaacatccagcatgttcctactcattctgctagtgcagctggagtgaaatccaggtcgactgtctctgcaacctgtgcttgtggtcaccccactagtatagggaactagttgcagcctattgacagttaattaattctagggcatatcactgcttttctcagcgccccagttaattcacctgtagatcatggtagaagtcagcaaacaggctctggaaccactgttttgttgcgaatcctagctacaatgcctgctagctgtaatcttggacaagtaatc

SEQ ID NO: 1126 - DNA, 1839 bp, Homo sapiens
agcaacggggtgcggcagggtggggaacgcgggagcggggccagctcccaggaaagctggtctgcgagcggcccctgcccggctcccaggtccctgcgcgaccccgcccttcccgagaccccagccgggctgccgcccgcgtcccggaagctccagcctgaaccatgtttttcacttgtggcccaaatgaggccatggtggtctccgggttctgccgaagccccccagtcatggtggctggagggcgtgtctttgtcctgccctgcatccaacagatccagaggatctctctcaacacactgaccctcaatgtcaagagtgaaaaggtttacactcgccatggggtccccatctcagtcactggcattgcccaggtaaaaatccaggggcagaacaaggagatgttggcggccgcctgtcagatgttcctggggaagacggaggctgagattgcccacattgccctggagacgttagagggccaccagagggccatcatggcccacatgactgtggaggagatctataaggacaggcagaaattctcagaacaggttttcaaagtggcctcctcagacctggtcaacatgggcatcagtgtggttagctacactctgaaggacattcacgatgaccaggactatttgcactctttggggaaggctcgaacagctcaagtccaaaaagatgcacggattggagaagcagaggccaagagagatgctgggatccgggaagctaaagccaagcaggaaaaggtgtctgctcagtacctgagtgagatcgagatggccaaggcacagagagattacgaactgaagaaggccgcctatgacatcgaggtcaacacccgccgagcacaggctgacctggcctatcagcttcaggtggccaagactaagcagcagattgaggagcagcgggtgcaggtgcaggtggtggagcgggcccagcaggtggcagtgcaggagcaggagatcgcccggcgggagaaggagctggaggcccgggtgcggaagccagcggaagcggagcgctacaagctggagcgcctagccgaggcagagaagtcccaactaattatgcaggcggaggcagaagccgcgtctgtgcggatgcgtggggaagctgaggcctttgccataggggcccgagcccgagccgaggctgagcagatggccaagaaggcagaagccttccagctgtaccaagaggctgctcagctggacatgctgctagagaagctgccccaggtggcagaggagatcagtggtcccttgacttcagccaataagatcacactggtgtccagcggcagtgggaccatgggggcagccaaagtgactggggaagtactggacattctaactcgcctgccagagagtgtggaaagactcacaggcgtgagcatctcccaggtgaatcacaagcctttgagaacagcctgagccttcagccctcacagatgcccagcctcatagctgaagttgcctgaatgatcctcctgttgcatgtaacccactggcctccctgagcatgtccattgacagtgaggtcccacccctcatctctccttgccaaatagtttgtgccttgtcttgaagggggttgctccccttgccaacctcacactgctatgattgccaactccagcggtcccatgtcagccttctgatgatcccactccaccccacctcaacttatttaacttcctaattaaatcagactgtttgagcctgttgtctagaatattttcctgaccaagactgagggatgggctggaggttttcaactttgctacccaaataaattgctgtaagtaagtactaaaaaaaaaaa

SEQ ID NO: 1127 - DNA, 1868 bp, Homo sapiens
cccggctgggcccgagagccagcgggcgggcgggctgcggactctagcggggcctgccgggaaaggggcgggccgagcgcactgggccgaggcggggcgaagtgggggtgcttagtccgcccttcccgagaccccagccgggctgccgcccgcgtcccggaagctccagcctgaaccatgtttttcacttgtggcccaaatgaggccatggtggtctccgggttctgccgaagccccccagtcatggtggctggagggcgtgtctttgtcctgccctgcatccaacagatccagaggatctctctcaacacactgaccctcaatgtcaagagtgaaaaggtttacactcgccatggggtccccatctcagtcactggcattgcccaggtaaaaatccaggggcagaacaaggagatgttggcggccgcctgtcagatgttcctggggaagacggaggctgagattgcccacattgccctggagacgttagagggccaccagagggccatcatggcccacatgactgtggaggagatctataaggacaggcagaaattctcagaacaggttttcaaagtggcctcctcagacctggtcaacatgggcatcagtgtggttagctacactctgaaggacattcacgatgaccaggactatttgcactctttggggaaggctcgaacagctcaagtccaaaaagatgcacggattggagaagcagaggccaagagagatgctgggatccgggaagctaaagccaagcaggaaaaggtgtctgctcagtacctgagtgagatcgagatggccaaggcacagagagattacgaactgaagaaggccgcctatgacatcgaggtcaacacccgccgagcacaggctgacctggcctatcagcttcaggtggccaagactaagcagcagattgaggagcagcgggtgcaggtgcaggtggtggagcgggcccagcaggtggcagtgcaggagcaggagatcgcccggcgggagaaggagctggaggcccgggtgcggaagccagcggaagcggagcgctacaagctggagcgcctagccgaggcagagaagtcccaactaattatgcaggcggaggcagaagccgcgtctgtgcggatgcgtggggaagctgaggcctttgccataggggcccgagcccgagccgaggctgagcagatggccaagaaggcagaagccttccagctgtaccaagaggctgctcagctggacatgctgctagagaagctgccccaggtggcagaggagatcagtggtcccttgacttcagccaataagatcacactggtgtccagcggcagtgggaccatgggggcagccaaagtgactggggaagtactggacattctaactcgcctgccagagagtgtggaaagactcacaggcgtgagcatctcccaggtgaatcacaagcctttgagaacagcctgagccttcagccctcacagatgcccagcctcatagctgaagttgcctgaatgatcctcctgttgcatgtaacccactggcctccctgagcatgtccattgacagtgaggtcccacccctcatctctccttgccaaatagtttgtgccttgtcttgaagggggttgctccccttgccaacctcacactgctatgattgccaactccagcggtcccatgtcagccttctgatgatcccactccaccccacctcaacttatttaacttcctaattaaatcagactgtttgagcctgttgtctagaatattttcctgaccaagactgagggatgggctggaggttttcaactttgctacccaaataaattgctgtaagtaagtactaataaaacagaagcaactggaaattaa

SEQ ID NO: 1128 - DNA, 2208 bp, Homo sapiens
gggcaccgtaaccagcgccgcggacaccggcaccggcgccacggactccgcaggaccccgcgcccgccgccgccgctatgctggggctgctggtggcgttgctggccctggggctcgctgtctttgcgctgctggacgtctggtacctggtgcgccttccgtgcgccgtgctgcgcgcgcgcctgctgcagccgcgcgtccgtgacctgctagctgagcagcgcttcccgggccgcgtgctgccctcggacttggacctgctgttgcacatgaacaacgcgcgctacctgcgcgaggccgactttgcgcgcgtcgcgcacctgacccgctgcggggtgctcggggcgctgagggagttgcgggcgcacacggtgctggcggcctcgtgcgcgcgccaccgccgctcgctgcgcctgctggagcccttcgaggtgcgcacccgcctgctgggctgggacgaccgcgcgttctacctggaggcgcgctttgtcagcctgcgggacggtttcgtgtgcgcgctgctgcgcttccggcagcacctgctgggcacctcacccgagcgcgtcgtgcagcacctgtgccagcgcagggtggagccccctgagctgcccgctgatctgcagcactggatctcctacaacgaggccagcagccagctgctccgcatggagagtgggctcagtgatgtcaccaaggaccagtgaccgccaccttcacaccgtctgccctggccaccatcctgggcctgggggctgcccacagatgggcagtctcagccatactctgttccagctggagtagcctcctgaccagcctggcccaccctgctccacccactgggcccccccagttattgatacccctctgtgctgggctccacgctaggcagaaggaggagtggcattggcatcctgacccagctctgccctcaaggtggggatggatgggcaaaggagagtcctgcctggccctacgatgaggccactcatgtgggcctaggtaggggaggatggtgcctggagcagagggacccacaagtgcctcccgagcctagatcctggctcggaccactgcaagggccgaggcagggccagaccagagcatcctgggtacaggcctgggctctccagggcctgggcctgattcaggtgcagtgggcactcctgaagggtcagagcggcatctgccaggcagcccctctggcttccgctgaggtggttgcaggcctggggcagagcctgggtggtcagaggccggggctagaggcagatggaagggaggcatttgctgacagaggacggggcacccgggctccccactgcagtcggccttgcctcctcctcctcctctacctccagtcaggctggacgggagggtagccttgtggctgagaggggtcagactaggtggcacaggggctcctggaaagacagcaggcttcctgctgggcgttcccttgttggagggaatagagtgggggtgggactctgcaggggtgtccttgtccactcgcacccctcgccgcccaccagggccatgctctgtgacttgggctgatccccaccctttctgggcctacagcaccacaggccgctgtacccccttagagctgcccctctctggcctggccggcaggcgtcttcttaactcctctgtcctctatattcagcatgttccttgtcagctgctgggccggccctgccttgcgctagcagagcctctcctggcagcttctcaggtctccctaatggagacaccaggctactaggacactggctggggccaccccctcctgcctaatgcctcaccttacagctggggaaactgaggcctggaatggcccagagtcaccaaggcaaagttggggctggtcccagcctgaggctccagctgatgccctcagctcccagagagggggtgccccatctagctgggtgcaggggtcactgcttgtcagctcagggccctgtgcccgcttgcctgttcccctacatctgtgcctgcacatccagaactgcctccttgccgctgcctccaggaagcccaccttgagccagagtcaagggctgcagcactgcccgatagaacacgcccgccctcactgctgttcttgccttacagccaccatgggaaagctgcaacctttctgttttatttaaagaaagcccaacattaaagggttttcattgcaaaaaaaaaaaaaaaaaa

SEQ ID NO: 1129 - DNA, 2190 bp, Homo sapiens
gggcaccgtaaccagcgccgcggacaccggcaccggcgccacggactccgcaggaccccgcgcccgccgccgccgctatgctggggctgctggtggcgttgctggccctggggctcgctgtctttgcgctgctggacgtctggtacctggtgcgccttccgtgcgccgtgctgcgcgcgcgcctgctgcagccgcgcgtccgtgacctgctagctgagcagcgcttcccgggccgcgtgctgccctcggacttggacctgctgttgcacatgaacaacgcgcgctacctgcgcgaggccgactttgcgcgcgtcgcgcacctgacccgctgcggggtgctcggggcgctgagggagttgcgggcgcacacggtgctggcggcctcgtgcgcgcgccaccgccgctcgctgcgcctgctggagcccttcgaggtgcgcacccgcctgctgggctgggacgaccgcgcgttctacctggaggcgcgctttgtcagcctgcgggacggtttcgtgtgcgcgctgctgcgcttccggcagcacctgctgggcacctcacccgagcgcgtcgtgcagcacctgtgccagcgcagggtggagccccctgagctgcccgctgatctgcagcactggatctcctacaacgaggccagcagccagctgctccgcatggagagtgggctcagtgatgtcaccaaggaccagtgaccgccaccttcacaccgtctgccctggccaccatcctgggcctgggggctgcccacagatgggcagtctcagccatactctgttccagctggagtagcctcctgaccagcctggcccaccctgctccacccactgggcccccccagttattgatacccctctgtgctgggctccacgctaggcagaaggaggagtggcattggcatcctgacccagctctgccctcaaggtggggatggatgggcaaaggagagtcctgcctggccctacgatgaggccactcatgtgggcctaggtaggggaggatggtgcctggagcagagggacccacaagtgcctcccgagcctagatcctggctcggaccactgcaagggccgaggcagggccagaccagagcatcctgggtacaggcctgggctctccagggcctgggcctgattcaggtgcagtgggcactcctgaagggtcagagcggcatctgccaggcagcccctctggcttccgctgaggtggttgcaggcctggggcagagcctgggtggtcagaggccggggctagaggcagatggaagggaggcatttgctgacagaggacggggcacccgggctccccactgcagtcggccttgcctcctcctcctcctctacctccagtcaggctggacgggagggtagccttgtggctgagaggggtcagactaggtggcacaggggctcctggaaagacagcaggcttcctgctgggcgttcccttgttggagggaatagagtgggggtgggactctgcaggggtgtccttgtccactcgcacccctcgccgcccaccagggccatgctctgtgacttgggctgatccccaccctttctgggcctacagcaccacaggccgctgtacccccttagagctgcccctctctggcctggccggcaggcgtcttcttaactcctctgtcctctatattcagcatgttccttgtcagctgctgggccggccctgccttgcgctagcagagcctctcctggcagcttctcaggtctccctaatggagacaccaggctactaggacactggctggggccaccccctcctgcctaatgcctcaccttacagctggggaaactgaggcctggaatggcccagagtcaccaaggcaaagttggggctggtcccagcctgaggctccagctgatgccctcagctcccagagagggggtgccccatctagctgggtgcaggggtcactgcttgtcagctcagggccctgtgcccgcttgcctgttcccctacatctgtgcctgcacatccagaactgcctccttgccgctgcctccaggaagcccaccttgagccagagtcaagggctgcagcactgcccgatagaacacgcccgccctcactgctgttcttgccttacagccaccatgggaaagctgcaacctttctgttttatttaaagaaagcccaacattaaagggttttcattgc

SEQ ID NO: 1130 - DNA, 3404 bp, Homo sapiens
ggtcaggcgcgtgaccccgcgtgaccggggtgcgcgagccgagaggccctggaagcgggactctgggaccccattgaaagaaaggcaaccagaaaaggcgaaacgacaacctcgatagtgattggagctgatggaacgagggcggagctaaagtcccagaatactggccaatcagagtttaagattatcagggagcccgggaaggggaaaggggcgaaatggttctatggtcacatgccgcggggtctggtgggaggagcggttgcccagcggcctcttggcgcttcctgtttccggttcccagagtggggcacagcgaggcgctagggggaacgctggcctctgaaactagctctgggaccggggtctgcggccggcccctagctggccccgtctcccatccccagaagggtattcactggggattctgagctttggctactccagtttcccacgacacgatgttccctttctacagctgctggaggactggactgctactactactcctggctgtggcagtgagagaatcctggcagacagaagaaaaaacttgcgacttggtaggagaaaagggtaaagagtcagagaaagagttggctctagtgaagaggctgaaaccactgtttaataaaagctttgagagcactgtgggccagggttcagacacatacatctacatcttcagggtgtgccgggaagctggcaaccacacttctggggcaggcctggtgcaaatcaacaaaagtaatgggaaggagacagtggtagggagactcaacgagactcacatcttcaacggaagtaattggatcatgctgatctataaagggggtgatgaatatgacaaccactgtggcaaggagcagcgtcgtgcagtggtgatgatctcctgcaatcgacacaccctagcggacaattttaaccctgtgtctgaggagcgtggcaaagtccaagattgtttctacctctttgagatggatagcagcctggcctgttcaccagagatctcccacctcagtgtgggttccatcttacttgtcacgtttgcatcactggttgctgtttatgttgttggggggttcctataccagcgactggtagtgggagccaaaggaatggagcagtttccccacttagccttctggcaggatcttggcaacctggtagcagatggctgtgactttgtctgccgttctaaacctcgaaatgtgcctgcagcatatcgtggtgtgggggatgaccagctgggggaggagtcagaagaaagggatgaccatttattaccaatgtagattgcactttatatgtccagcctcttcctcagtcccccaaaccaaagctacacagccagatttctcaagcagtctcaactccagtccctcatctcacccttactattgctcttgctttccagtttgcttttgatttgcatcttctcactagtaaaactgccttccctttgttccttattttctgttttttctctagagaggtacagttgtaagtcagagttaatataatagggcctgtgaaaacagaggcttttgcattgtctcttgacatcagaagttacaataggcatatgggcaaaatggtgtagcaggctcactggccgtttgttttttaaacacattttcacaagtttttgagacactggatttctttaattaaaaaaaaaatgccaagaaacattatttatacagggttgattgctttcatgttgttattctgtaccctatagtagcctccatgagaatctggtatttcttgctgcttggaactactttgcagtgattacttggttgcagtccaagtactctcgtttagtctgagcctggagatgttctagacttgcttctcccacctctgagattaggacaggaaaaatgtgaaatttcccaattacaggattatacggtaccatcacatcatttgtggaaattggggtgactgtatagctgggattgggctaaggactgtggtcttatctgtccacatacagccaaaatgcctatccagaaatccagttcgttggaaaggaaaattggtactcctgtgccacaggggttccagaaaagggaagtcactttaccttgcggtggtgggatcctgatgtctttcatccatttgtagtaaaagctggtaaagcttttcttactcctggttccctaccagtatttctaaacatgtcgcactttctccacaggcatgtggttttgacctttttttcaatcttctagaaagggaacggaagcagaagtgggacatcgagggctctgctgtcctctgcgctgggtgtggaatgctgctgcacctgtcccttctgctggctcagggaagtgtcttcttgcccacatttctgtggggaaaggtttttaatcctctgatgcttccatcttcctgtttaggccatgtgcccagaaacctggactgatctttctttaatagtgaacccctgggccactgaagagtaacatggctccactggacacaaaagagggatggaatcaacaggcagggggccttttataagccttaggaaaagaaaatgaaactatttcatctttggacttttcaatactattggagtgattttttttctttctaaacagggaaaataatgttacaaaagcatcttttttgttatttgtttgcatccctcccccacaccctggtgttttaaaatgaagaaaaaaaaccatcactttttgtacaaaaactcttaatgattaaaaaacaaacaaaacatattggccttgtcatttgtgtgaaagtgggcaaagactggaatagagtaagacaactgaaaccaattttcatccttttactgaggaaaaaaatatttaatatttttgttatataaggaatagtgcctaaggcaggtacttatactcctgacctcagccccacacactctggttttataaagctataggacagagcagagatggaactgaaaaacagggtagaaaataacataaattggaggggaacagtgggatgcagaaagaatgacaacagccacatgtgccccagtcaaatacttttagtccctgcagcagaagatgccaaccaagtctctatactggctggggatcctgccatggatgcaggagaaaaaattcaatcacaagggagtaagtgacaacaaaaagaaaaaactctgagccacagctacactgggaggggggaggaccagattttgctacttctgtcacacaagctagaaaaaccctacctctcccattgggcaggcaacctgacattccacccagttccttgccttaccatactatgtattcctcctcttggagaattaagacctgggctaaatgctccactccaggataaggctgagcagtcctagttctctagactgcctcttttataaagattggatt

SEQ ID NO: 1131 - DNA, 1079 bp, Homo sapiens
ccagagtggggcacagcgaggcgctagggggaacgctggcctctgaaactagctctgggaccggggtctgcggccggcccctagctggccccgtctcccatccccagaagggtattcactggggattctgagctttggctactccagtttcccacgacacctgctggaggactggactgctactactactcctggctgtggcagtgagagaatcctggcagacagaagaaaaaacttgcgacttggtaggagaaaagggtaaagagtcagagaaagagttggctctagtgaagaggctgaaaccactgtttaataaaagctttgagagcactgtgggccagggttcagacacatacatctacatcttcagggtgtgccgggaagctggcaaccacacttctggggcaggcctggtgcaaatcaacaaaagtaatgggaaggagacagtggtagggagactcaacgagactcacatcttcaacggaagtaattggatcatgctgatctataaagggggtgatgaatatgacaaccactgtggcaaggagcagcgtcgtgcagtggtgatgatctcctgcaatcgacacaccctagcggacaattttaaccctgtgtctgaggagcgtggcaaagtccaagattgtttctacctctttgagatggatagcagcctggcctgttcaccagagatctcccacctcagtgtgggttccatcttacttgtcacgtttgcatcactggttgctgtttatgttgttggggggttcctataccagcgactggtagtgggagccaaaggaatggagcagtttccccacttagccttctggcaggatcttggcaacctggtagcagcatgtggttttgacctttttttcaatcttctagaaagggaacggaagcagaagtgggacatcgagggctctgctgtcctctgcgctgggtgtggaatgctgctgcacctgtcccttctgctggctcagggaagtgtcttcttgcccacatttctgtggggaaaggtttttaatcctctgatgcttccatcttcctgtttaggccatgtgcccagaaacctggac

SEQ ID NO: 1132 - DNA, 2872 bp, Homo sapiens
ggttcccagagtggggcacagcgaggcgctagggggaacgctggcctctgaaactagctctgggaccggggtctgcggccggcccctagctggccccgtctcccatccccagaagggtattcactggggattctgagctttggctactccagtttcccacgacacgtgagtgatgttccctttctacagctgctggaggactggactgctactactactcctggctgtggcagtgagagaatcctggcagacagaagaaaaaacttgcgacttggtaggagaaaagggtaaagagtcagagaaagagttggctctagtgaagaggctgaaaccactgtttaataaaagctttgagagcactgtgggccagggttcagacacatacatctacatcttcagggtgtgccgggaagctggcaaccacacttctggggcaggcctggtgcaaatcaacaaaagtaatgggaaggagacagtggtagggagactcaacgagactcacatcttcaacggaagtaattggatcatgctgatctataaagggggtgatgaatatgacaaccactgtggcaaggagcagcgtcgtgcagtggtgatgatctcctgcaatcgacacaccctagcggacaattttaaccctgtgtctgaggagcgtggcaaagtccaagattgtttctacctctttgagatggatagcagcctggcctgttcaccagagatctcccacctcagtgtgggttccatcttacttgtcacgtttgcatcactggttgctgtttatgttgttggggggttcctataccagcgactggtagtgggagccaaaggaatggagcagtttccccacttagccttctggcaggatcttggcaacctggtagcagatggctgtgactttgtctgccgttctaaacctcgaaatgtgcctgcagcatatcgtggtgtgggggatgaccagctgggggaggagtcagaagaaagggatgaccatttattaccaatgtagattgcactttatatgtccagcctcttcctcagtcccccaaaccaaagctacacagccagatttctcaagcagtctcaactccagtccctcatctcacccttactattgctcttgctttccagtttgcttttgatttgcatcttctcactagtaaaactgccttccctttgttccttattttctgttttttctctagagaggtacagttgtaagtcagagttaatataatagggcctgtgaaaacagaggcttttgcattgtctcttgacatcagaagttacaataggcatatgggcaaaatggtgtagcaggctcactggccgtttgttttttaaacacattttcacaagtttttgagacactggatttctttaattaaaaaaaaaatgccaagaaacattatttatacagggttgattgctttcatgttgttattctgtaccctatagtagcctccatgagaatctggtatttcttgctgcttggaactactttgcagtgattacttggttgcagtccaagtactctcgtttagtctgagcctggagatgttctagacttgcttctcccacctctgagattaggacaggaaaaatgtgaaatttcccaattacaggattatacggtaccatcacatcatttgtggaaattggggtgactgtatagctgggattgggctaaggactgtggtcttatctgtccacatacagccaaaatgcctatccagaaatccagttcgttggaaaggaaaattggtactcctgtgccacaggggttccagaaaagggaagtcactttaccttgcggtggtgggatcctgatgtctttcatccatttgtagtaaaagctggtaaagcttttcttactcctggttccctaccagtatttctaaacatgtcgcactttctccacaggcatgtggttttgacctttttttcaatcttctagaaagggaacggaagcagaagtgggacatcgagggctctgctgtcctctgcgctgggtgtggaatgctgctgcacctgtcccttctgctggctcagggaagtgtcttcttgcccacatttctgtggggaaaggtttttaatcctctgatgcttccatcttcctgtttaggccatgtgcccagaaacctggactgatctttctttaatagtgaacccctgggccactgaagagtaacatggctccactggacacaaaagagggatggaatcaacaggcagggggccttttataagccttaggaaaagaaaatgaaactatttcatctttggacttttcaatactattggagtgattttttttctttctaaacagggaaaataatgttacaaaagcatcttttttgttatttgtttgcatccctcccccacaccctggtgttttaaaatgaagaaaaaaaaccatcactttttgtacaaaaactcttaatgattaaaaaacaaacaaaacatattggccttgtcatttgtgtgaaagtgggcaaagactggaatagagtaagacaactgaaaccaattttcatccttttactgaggaaaaaaatatttaatatttttgttatataaggaatagtgcctaaggcaggtacttatactcctgacctcagccccacacactctggttttataaagctataggacagagcagagatggaactgaaaaacagggtagaaaataacataaattggaggggaacagtgggatgcagaaagaatgacaacagccacattgaatggggctggatctgtgtgtaggtggctgagctaataagtgtctggctgggcgcaggtgtggctgtccgtgtcaggttcatgcccacattctgctggccactcccatctgcttctgccttcttggctg

SEQ ID NO: 1133 - DNA, 3161 bp, Homo sapiens
ggtcaggcgcgtgaccccgcgtgaccggggtgcgcgagccgagaggccctggaagcgggactctgggaccccattgaaagaaaggcaaccagaaaaggcgaaacgacaacctcgatagtgattggagctgatggaacgagggcggagctaaagtcccagaatactggccaatcagagtttaagattatcagggagcccgggaaggggaaaggggcgaaatggttctatggtcacatgccgcggggtctggtgggaggagcggttgcccagcggcctcttggcgcttcctgtttccggttcccagagtggggcacagcgaggcgctagggggaacgctggcctctgaaactagctctgggaccggggtctgcggccggcccctagctggccccgtctcccatccccagaagggtattcactggggattctgagctttggctactccagtttcccacgacacgatgttccctttctacagctgctggaggactggactgctactactactcctggctgtggcagtgagagaatcctggcagacagaagaaaaaacttgcgacttggtaggagaaaagggtaaagagtcagagaaagagttggctctagtgaagaggctgaaaccactgtttaataaaagctttgagagcactgtgggccagggttcagacacatacatctacatcttcagggtgtgccgggaagctggcaaccacacttctggggcaggcctggtgcaaatcaacaaaagtaatgggaaggagacagtggtagggagactcaacgagactcacatcttcaacggaagtaattggatcatgctgatctataaagggggtgatgaatatgacaaccactgtggcaaggagcagcgtcgtgcagtggtgatgatctcctgcaatcgacacaccctagcggacaattttaaccctgtgtctgaggagcgtggcaaagtccaagattgtttctacctctttgagatggatagcagcctggcctgttcaccagagatctcccacctcagtgtgggttccatcttacttgtcacgtttgcatcactggttgctgtttatgttgttggggggttcctataccagcgactggtagtgggagccaaaggaatggagcagtttccccacttagccttctggcaggatcttggcaacctggtagcagatggctgtgactttgtctgccgttctaaacctcgaaatgtgcctgcagcatatcgtggtgtgggggatgaccagctgggggaggagtcagaagaaagggatgaccatttattaccaatgtagattgcactttatatgtccagcctcttcctcagtcccccaaaccaaagctacacagccagatttctcaagcagtctcaactccagtccctcatctcacccttactattgctcttgctttccagtttgcttttgatttgcatcttctcactagtaaaactgccttccctttgttccttattttctgttttttctctagagaggtacagttgtaagtcagagttaatataatagggcctgtgaaaacagaggcttttgcattgtctcttgacatcagaagttacaataggcatatgggcaaaatggtgtagcaggctcactggccgtttgttttttaaacacattttcacaagtttttgagacactggatttctttaattaaaaaaaaaatgccaagaaacattatttatacagggttgattgctttcatgttgttattctgtaccctatagtagcctccatgagaatctggtatttcttgctgcttggaactactttgcagtgattacttggttgcagtccaagtactctcgtttagtctgagcctggagatgttctagacttgcttctcccacctctgagattaggacaggaaaaatgtgaaatttcccaattacaggattatacggtaccatcacatcatttgtggaaattggggtgactgtatagctgggattgggctaaggactgtggtcttatctgtccacatacagccaaaatgcctatccagaaatccagttcgttggaaaggaaaattggtactcctgtgccacaggggttccagaaaagggaagtcactttaccttgcggtggtgggatcctgatgtctttcatccatttgtagtaaaagctggtaaagcttttcttactcctggttccctaccagtatttctaaacatgtcgcactttctccacaggcatgtggttttgacctttttttcaatcttctagaaagggaacggaagcagaagtgggacatcgagggctctgctgtcctctgcgctgggtgtggaatgctgctgcacctgtcccttctgctggctcagggaagtgtcttcttgcccacatttctgtggggaaaggtttttaatcctctgatgcttccatcttcctgtttaggccatgtgcccagaaacctggactgatctttctttaatagtgaacccctgggccactgaagagtaacatggctccactggacacaaaagagggatggaatcaacaggcagggggccttttataagccttaggaaaagaaaatgaaactatttcatctttggacttttcaatactattggagtgattttttttctttctaaacagggaaaataatgttacaaaagcatcttttttgttatttgtttgcatccctcccccacaccctggtgttttaaaatgaagaaaaaaaaccatcactttttgtacaaaaactcttaatgattaaaaaacaaacaaaacatattggccttgtcatttgtgtgaaagtgggcaaagactggaatagagtaagacaactgaaaccaattttcatccttttactgaggaaaaaaatatttaatatttttgttatataaggaatagtgcctaaggcaggtacttatactcctgacctcagccccacacactctggttttataaagctataggacagagcagagatggaactgaaaaacagggtagaaaataacataaattggaggggaacagtgggatgcagaaagaatgacaacagccacattgaatggggctggatctgtgtgtaggtggctgagctaataagtgtctggctgggcgcaggtgtggctgtccgtgtcaggttcatgcccacattctgctggccactcccatctgcttctgccttcttggctg

SEQ ID NO: 1134 - DNA, 2428 bp, Homo sapiens
cgaggcgctagggggaacgctggcctctgaaactagctctgggaccggggtctgcggccggcccctagctggccccgtctcccatccccagaagggtattcactggggattctgagctttggctactccagtttcccacgacacgatgttccctttctacagctgctggaggactggactgctactactactcctggctgtggcagtgagagaatcctggcagacagaagaaaaaacttgcgacttggtaggagaaaagggtaaagagtcagagaaagagttggctctagtgaagaggctgaaaccactgtttaataaaagctttgagagcactgtgggccagggttcagacacatacatctacatcttcagggtgtgccgggaagctggcaaccacacttctggggcaggcctggtgcaaatcaacaaaagtaatgggaaggagacagtggtagggagactcaacgagactcacatcttcaacggaagtaattggatcatgctgatctataaagggggtgatgaatatgacaaccactgtggcaaggagcagcgtcgtgcagtggtgatgatctcctgcaatcgacacaccctagcggacaattttaaccctgtgtctgaggagcgtggcaaagtccaagattgtttctacctctttgagatggatagcagcctggcctgttcaccagagatctcccacctcagtgtgggttccatcttacttgtcacgtttgcatcactggttgctgtttatgttgttggggggttcctataccagcgactggtagtgggagccaaaggaatggagcagtttccccacttagccttctggcaggatcttggcaacctggtagcagatggctgtgactttgtctgccgttctaaacctcgaaatgtgcctgcagcatatcgtggtgtgggggatgaccagctgggggaggagtcagaagaaagggatgaccatttattaccaatgtagattgcactttatatgtccagcctcttcctcagtcccccaaaccaaagctacacagccagatttctcaagcagtctcaactccagtccctcatctcacccttactattgctcttgctttccagtttgcttttgatttgcatcttctcactagtaaaactgccttccctttgttccttattttctgttttttctctagagaggtacagttgtaagtcagagttaatataatagggcctgtgaaaacagaggcttttgcattgtctcttgacatcagaagttacaataggcatatgggcaaaatggtgtagcaggctcactggccgtttgttttttaaacacattttcacaagtttttgagacactggatttctttaattaaaaaaaaaatgccaagaaacattatttatacagggttgattgctttcatgttgttattctgtaccctatagtagcctccatgagaatctggtatttcttgctgcttggaactactttgcagtgattacttggttgcagtccaagtactctcgtttagtctgagcctggagatgttctagacttgcttctcccacctctgagattaggacaggaaaaatgtgaaatttcccaattacaggattatacggtaccatcacatcatttgtggaaattggggtgactgtatagctgggattgggctaaggactgtggtcttatctgtccacatacagccaaaatgcctatccagaaatccagttcgttggaaaggaaaattggtactcctgtgccacaggggttccagaaaagggaagtcactttaccttgcggtggtgggatcctgatgtctttcatccatttgtagtaaaagctggtaaagcttttcttactcctggttccctaccagtatttctaaacatgtcgcactttctccacaggcatgtggttttgacctttttttcaatcttctagaaagggaacggaagcagaagtgggacatcgagggctctgctgtcctctgcgctgggtgtggaatgctgctgcacctgtcccttctgctggctcagggaagtgtcttcttgcccacatttctgtggggaaaggtttttaatcctctgatgcttccatcttcctgtttaggccatgtgcccagaaacctggactgatctttctttaatagtgaacccctgggccactgaagagtaacatggctccactggacacaaaagagggatggaatcaacaggcagggggccttttataagccttaggaaaagaaaatgaaactatttcatctttggacttttcaatactattggagtgatttttttctttctaaacagggaaaataatgttacaaaagcatcttttttgttatttgtttgcatccctcccccacaccctggtgttttaaaatgaagaaaaaaaaccatcaccttttgtacaaaaactcttaatgattaaaaaacaaac

SEQ ID NO: 1135 - DNA, 2727 bp, Homo sapiens
cgcgcgggcgagcggttgtgcttgtgcttgtggcgcgtggtgcgggtttcggcggcggctgaggaagaagcgcgggcggcgccttcgggaggcgagcaggcagcagttggccgtgccgtagcagcgtcccgcgcgcggcgggcagcggcccaggaggcgcgtggcggcgctcggcctcgcggcggcggcgcactgcggcgtgtgcagagagcgcctgcgacccgagagggagccccgcctgctgccctgtttgcactcggcctgtagtgcctgcttagggcccgcggcccccgccgccgccaacagctcgggggacggcggggcggcgggcgacggcaccgtggtggactgtcccgtgtgcaagcaacagtgcttctccaaagacatcgtggagaattatttcatgcgtgatagtggcagcaaggctgccaccgacgcccaggatgcgaaccagtgctgcactagctgtgaggataatgccccagccaccagctactgtgtggagtgctcggagcctctgtgtgagacctgtgtagaggcgcaccagcgggtgaagtacaccaaggaccatactgtgcgctctactgggccagccaagtctcgggatggtgaacgtactgtctattgcaacgtacacaagcatgaaccccttgtgctgttttgtgagagctgtgatactctcacctgccgagactgccagctcaatgcccacaaggaccaccagtaccagttcttagaggatgcagtgaggaaccagcgcaagctcctggcctcactggtgaagcgccttggggacaaacatgcaacattgcagaagagcaccaaggaggttcgcagctcaatccgccaggtgtctgacgtacagaagcgtgtgcaagtggatgtcaagatggccatcctgcagatcatgaaggagctgaataagcggggccgtgtgctggtcaatgatgcccagaaggtgactgaggggcagcaggagcgcctggagcggcagcactggaccatgaccaagatccagaagcaccaggagcacattctgcgctttgcctcttgggctctggagagtgacaacaacacagcccttttgctttctaagaagttgatctacttccagctgcaccgggccctcaagatgattgtggatcccgtggagccacatggcgagatgaagtttcagtgggacctcaatgcctggaccaagagtgccgaggcctttggcaagattgtggcagagcgtcctggcactaactcaacaggccctgcacccatggcccctccaagagccccagggcccctgagcaagcagggctctggcagcagccagcccatggaggtgcaggaaggctatggctttgggtcaggagatgatccctactcaagtgcagagccccatgtgtcaggtgtgaaacggtcccgctcaggtgagggcgaggtgagcggccttatgcgcaaggtgccacgagtgagccttgaacgcctggacctggacctcacagctgacagccagccacccgtcttcaaggtcttcccaggcagtaccactgaggactacaaccttattgttattgaacgtggcgctgccgctgcagctaccggccagccagggactgcgcctgcaggaacccctggtgccccacccctggctggcatggccattgtcaaggaggaggagacggaggctgccattggagcccctcctactgccactgagggccctgagaccaaacctgtgcttatggctcttgcggagggtcctggtgctgagggtccccgcctggcctcacctagtggcagcaccagctcagggctggaggtggtggctcctgagggtacctcagccccaggtggtggcccgggaaccctggatgacagtgccaccatttgccgtgtctgccagaagccaggcgatctggttatgtgcaaccagtgtgagttttgtttccacctggactgtcacctgccggccctgcaggatgtaccaggggaggagtggagctgctcactctgccatgtgctccctgacctgaaggaggaggatggcagcctcagcctggatggtgcagacagcactggcgtggtggccaagctctcaccagccaaccagcggaaatgtgagcgtgtactgctggccctattctgtcacgaaccctgccgccccctgcatcagctggctaccgactccaccttctccctggaccagcccggtggcaccctggatctgaccctgatccgtgcccgcctccaggagaagttgtcacctccctacagctccccacaggagtttgcccaggatgtgggccgcatgttcaagcaattcaacaagttaactgaggacaaggcagacgtgcagtccatcatcggcctgcagcgcttcttcgagacgcgcatgaacgaggccttcggtgacaccaagttctctgctgtgctggtggagcccccgccgatgagcctgcctggtgctggcctgagttcccaggagctgtctggtggccctggtgatggcccctgaggctggagcccccatggccagcccagcctggctctgttctctgtcctgtcaccccatccccactcccctggtggcctgactcccactccctggtggccccatcccccagttcctcacgatatggtttttacttctgtggatttaataaaaacttcaccagttcctcaggcgttggctggttgggggactgtggtcctggggcctggtttattgactgt

SEQ ID NO: 1136 - DNA, 3146 bp, Homo sapiens
cggcggcgaagagacgcgggttgaggaagagggacggattgcccatgcgcttgggcgcacagcggcccgcttctgtgtggtctggaggtggagctgagaggggaatcacactctataaaggttcgcataccccactggcggattcaattgcggcagtgacgtcacagaggccccgccccgcccccacaagagccccaccgacgtggggttggcggtggtggaaggactaggagttggcgcgtgcgtactggcggcctctcccgcaccgaccggcctgggccccgcccccgggcgtgaggcgcccaatgcgcgtgcgcggcggcgtcggcgccagttatttctgtcccgccccccggcctcggctctttctgcgagcgggcgcgcgggcgagcggttgtgcttgtgcttgtggcgcgtggtgcgggtttcggcggcggctgaggaagaagcgcgggcggcgccttcgggaggcgagcaggcagcagttggccgtgccgtagcagcgtcccgcgcgcggcgggcagcggcccaggaggcgcgtggcggcgctcggcctcgcggcggcggcggcggcagcggcccagcagttggcggcgagcgcgtctgcgcctgcgcggcgggccccgcgcccctcctccccccctgggcgcccccggcggcgtgtgaatggcggcctccgcggcggcagcctcggcagcagcggcctcggccgcctctggcagcccgggcccgggcgagggctccgctggcggcgaaaagcgctccaccgccccttcggccgcagcctcggcctctgcctcagccgcggcgtcgtcgcccgcggggggcggcgccgaggcgctggagctgctggagcactgcggcgtgtgcagagagcgcctgcgacccgagagggagccccgcctgctgccctgtttgcactcggcctgtagtgcctgcttagggcccgcggcccccgccgccgccaacagctcgggggacggcggggcggcgggcgacggcaccgggccagccaagtctcgggatggtgaacgtactgtctattgcaacgtacacaagcatgaaccccttgtgctgttttgtgagagctgtgatactctcacctgccgagactgccagctcaatgcccacaaggaccaccagtaccagttcttagaggatgcagtgaggaaccagcgcaagctcctggcctcactggtgaagcgccttggggacaaacatgcaacattgcagaagagcaccaaggaggttcgcagctcaatccgccaggtgtctgacgtacagaagcgtgtgcaagtggatgtcaagatggccatcctgcagatcatgaaggagctgaataagcggggccgtgtgctggtcaatgatgcccagaaggtgactgaggggcagcaggagcgcctggagcggcagcactggaccatgaccaagatccagaagcaccaggagcacattctgcgctttgcctcttgggctctggagagtgacaacaacacagcccttttgctttctaagaagttgatctacttccagctgcaccgggccctcaagatgattgtggatcccgtggagccacatggcgagatgaagtttcagtgggacctcaatgcctggaccaagagtgccgaggcctttggcaagattgtggcagagcgtcctggcactaactcaacaggccctgcacccatggcccctccaagagccccagggcccctgagcaagcagggctctggcagcagccagcccatggaggtgcaggaaggctatggctttgggtcaggagatgatccctactcaagtgcagagccccatgtgtcaggtgtgaaacggtcccgctcaggtgagggcgaggtgagcggccttatgcgcaaggtgccacgagtgagccttgaacgcctggacctggacctcacagctgacagccagccacccgtcttcaaggtcttcccaggcagtaccactgaggactacaaccttattgttattgaacgtggcgctgccgctgcagctaccggccagccagggactgcgcctgcaggaacccctggtgccccacccctggctggcatggccattgtcaaggaggaggagacggaggctgccattggagcccctcctactgccactgagggccctgagaccaaacctgtgcttatggctcttgcggagggtcctggtgctgagggtccccgcctggcctcacctagtggcagcaccagctcagggctggaggtggtggctcctgagggtacctcagccccaggtggtggcccgggaaccctggatgacagtgccaccatttgccgtgtctgccagaagccaggcgatctggttatgtgcaaccagtgtgagttttgtttccacctggactgtcacctgccggccctgcaggatgtaccaggggaggagtggagctgctcactctgccatgtgctccctgacctgaaggaggaggatggcagcctcagcctggatggtgcagacagcactggcgtggtggccaagctctcaccagccaaccagcggaaatgtgagcgtgtactgctggccctattctgtcacgaaccctgccgccccctgcatcagctggctaccgactccaccttctccctggaccagcccggtggcaccctggatctgaccctgatccgtgcccgcctccaggagaagttgtcacctccctacagctccccacaggagtttgcccaggatgtgggccgcatgttcaagcaattcaacaagttaactgaggacaaggcagacgtgcagtccatcatcggcctgcagcgcttcttcgagacgcgcatgaacgaggccttcggtgacaccaagttctctgctgtgctggtggagcccccgccgatgagcctgcctggtgctggcctgagttcccaggagctgtctggtggccctggtgatggcccctgaggctggagcccccatggccagcccagcctggctctgttctctgtcctgtcaccccatccccactcccctggtggcctgactcccactccctggtggccccatcccccagttcctcacgatatggtttttacttctgtggatttaataaaaacttcaccagttcctcaggcgttggctggttgggggactgtggtcctggggcctggtttattgactgt

SEQ ID NO: 1137 - DNA, 2989 bp, Homo sapiens
ggcgcgcgggcgagcggttgtgcttgtgcttgtggcgcgtggtgcgggtttcggcggcggctgaggaagaagcgcgggcggcgccttcgggaggcgagcaggcagcagttggccgtgccgtagcagcgtcccgcgcgcggcgggcagcggcccaggaggcgcgtggcggcgctcggcctcgcggcggcggcggcggcagcggcccagcagttggcggcgagcgcgtctgcgcctgcgcggcgggccccgcgcccctcctccccccctgggcgcccccggcggcgtgtgaatggcggcctccgcggcggcagcctcggcagcagcggcctcggccgcctctggcagcccgggcccgggcgagggctccgctggcggcgaaaagcgctccaccgccccttcggccgcagcctcggcctctgcctcagccgcggcgtcgtcgcccgcggggggcggcgccgaggcgctggagctgctggagcactgcggcgtgtgcagagagcgcctgcgacccgagagggagccccgcctgctgccctgtttgcactcggcctgtagtgcctgcttagggcccgcggcccccgccgccgccaacagctcgggggacggcggggcggcgggcgacggcaccgtggtggactgtcccgtgtgcaagcaacagtgcttctccaaagacatcgtggagaattatttcatgcgtgatagtggcagcaaggctgccaccgacgcccaggatgcgaaccagtgctgcactagctgtgaggataatgccccagccaccagctactgtgtggagtgctcggagcctctgtgtgagacctgtgtagaggcgcaccagcgggtgaagtacaccaaggaccatactgtgcgctctactgggccagccaagtctcgggatggtgaacgtactgtctattgcaacgtacacaagcatgaaccccttgtgctgttttgtgagagctgtgatactctcacctgccgagactgccagctcaatgcccacaaggaccaccagtaccagttcttagaggatgcagtgaggaaccagcgcaagctcctggcctcactggtgaagcgccttggggacaaacatgcaacattgcagaagagcaccaaggaggttcgcagctcaatccgccaggtgtctgacgtacagaagcgtgtgcaagtggatgtcaagatggccatcctgcagatcatgaaggagctgaataagcggggccgtgtgctggtcaatgatgcccagaaggtgactgaggggcagcaggagcgcctggagcggcagcactggaccatgaccaagatccagaagcaccaggagcacattctgcgctttgcctcttgggctctggagagtgacaacaacacagcccttttgctttctaagaagttgatctacttccagctgcaccgggccctcaagatgattgtggatcccgtggagccacatggcgagatgaagtttcagtgggacctcaatgcctggaccaagagtgccgaggcctttggcaagattgtggcagagcgtcctggcactaactcaacaggccctgcacccatggcccctccaagagccccagggcccctgagcaagcagggctctggcagcagccagcccatggaggtgcaggaaggctatggctttgggtcaggagatgatccctactcaagtgcagagccccatgtgtcaggtgtgaaacggtcccgctcaggtgagggcgaggtgagcggccttatgcgcaaggtgccacgagtgagccttgaacgcctggacctggacctcacagctgacagccagccacccgtcttcaaggtcttcccaggcagtaccactgaggactacaaccttattgttattgaacgtggcgctgccgctgcagctaccggccagccagggactgcgcctgcaggaacccctggtgccccacccctggctggcatggccattgtcaaggaggaggagacggaggctgccattggagcccctcctactgccactgagggccctgagaccaaacctgtgcttatggctcttgcggagggtcctggtgctgagggtccccgcctggcctcacctagtggcagcaccagctcagggctggaggtggtggctcctgagggtacctcagccccaggtggtggcccgggaaccctggatgacagtgccaccatttgccgtgtctgccagaagccaggcgatctggttatgtgcaaccagtgtgagttttgtttccacctggactgtcacctgccggccctgcaggatgtaccaggggaggagtggagctgctcactctgccatgtgctccctgacctgaaggaggaggatggcagcctcagcctggatggtgcagacagcactggcgtggtggccaagctctcaccagccaaccagcggaaatgtgagcgtgtactgctggccctattctgtcacgaaccctgccgccccctgcatcagctggctaccgactccaccttctccctggaccagcccggtggcaccctggatctgaccctgatccgtgcccgcctccaggagaagttgtcacctccctacagctccccacaggagtttgcccaggatgtgggccgcatgttcaagcaattcaacaagttaactgaggacaaggcagacgtgcagtccatcatcggcctgcagcgcttcttcgagacgcgcatgaacgaggccttcggtgacaccaagttctctgctgtgctggtggagcccccgccgatgagcctgcctggtgctggcctgagttcccaggagctgtctggtggccctggtgatggcccctgaggctggagcccccatggccagcccagcctggctctgttctctgtcctgtcaccccatccccactcccctggtggcctgactcccactccctggtggccccatcccccagttcctcacgatatggtttttacttctgtggatttaataaaaacttcaccagttaaaaaaaaaaaaaaaaaaaaaaaaaaaaaa

SEQ ID NO: 1138 - DNA, 3392 bp, Homo sapiens
cggcggcgaagagacgcgggttgaggaagagggacggattgcccatgcgcttgggcgcacagcggcccgcttctgtgtggtctggaggtggagctgagaggggaatcacactctataaaggttcgcataccccactggcggattcaattgcggcagtgacgtcacagaggccccgccccgcccccacaagagccccaccgacgtggggttggcggtggtggaaggactaggagttggcgcgtgcgtactggcggcctctcccgcaccgaccggcctgggccccgcccccgggcgtgaggcgcccaatgcgcgtgcgcggcggcgtcggcgccagttatttctgtcccgccccccggcctcggctctttctgcgagcgggcgcgcgggcgagcggttgtgcttgtgcttgtggcgcgtggtgcgggtttcggcggcggctgaggaagaagcgcgggcggcgccttcgggaggcgagcaggcagcagttggccgtgccgtagcagcgtcccgcgcgcggcgggcagcggcccaggaggcgcgtggcggcgctcggcctcgcggcggcggcggcggcagcggcccagcagttggcggcgagcgcgtctgcgcctgcgcggcgggccccgcgcccctcctccccccctgggcgcccccggcggcgtgtgaatggcggcctccgcggcggcagcctcggcagcagcggcctcggccgcctctggcagcccgggcccgggcgagggctccgctggcggcgaaaagcgctccaccgccccttcggccgcagcctcggcctctgcctcagccgcggcgtcgtcgcccgcggggggcggcgccgaggcgctggagctgctggagcactgcggcgtgtgcagagagcgcctgcgacccgagagggagccccgcctgctgccctgtttgcactcggcctgtagtgcctgcttagggcccgcggcccccgccgccgccaacagctcgggggacggcggggcggcgggcgacggcaccgtggtggactgtcccgtgtgcaagcaacagtgcttctccaaagacatcgtggagaattatttcatgcgtgatagtggcagcaaggctgccaccgacgcccaggatgcgaaccagtgctgcactagctgtgaggataatgccccagccaccagctactgtgtggagtgctcggagcctctgtgtgagacctgtgtagaggcgcaccagcgggtgaagtacaccaaggaccatactgtgcgctctactgggccagccaagtctcgggatggtgaacgtactgtctattgcaacgtacacaagcatgaaccccttgtgctgttttgtgagagctgtgatactctcacctgccgagactgccagctcaatgcccacaaggaccaccagtaccagttcttagaggatgcagtgaggaaccagcgcaagctcctggcctcactggtgaagcgccttggggacaaacatgcaacattgcagaagagcaccaaggaggttcgcagctcaatccgccaggtgtctgacgtacagaagcgtgtgcaagtggatgtcaagatggccatcctgcagatcatgaaggagctgaataagcggggccgtgtgctggtcaatgatgcccagaaggtgactgaggggcagcaggagcgcctggagcggcagcactggaccatgaccaagatccagaagcaccaggagcacattctgcgctttgcctcttgggctctggagagtgacaacaacacagcccttttgctttctaagaagttgatctacttccagctgcaccgggccctcaagatgattgtggatcccgtggagccacatggcgagatgaagtttcagtgggacctcaatgcctggaccaagagtgccgaggcctttggcaagattgtggcagagcgtcctggcactaactcaacaggccctgcacccatggcccctccaagagccccagggcccctgagcaagcagggctctggcagcagccagcccatggaggtgcaggaaggctatggctttgggtcaggagatgatccctactcaagtgcagagccccatgtgtcaggtgtgaaacggtcccgctcaggtgagggcgaggtgagcggccttatgcgcaaggtgccacgagtgagccttgaacgcctggacctggacctcacagctgacagccagccacccgtcttcaaggtcttcccaggcagtaccactgaggactacaaccttattgttattgaacgtggcgctgccgctgcagctaccggccagccagggactgcgcctgcaggaacccctggtgccccacccctggctggcatggccattgtcaaggaggaggagacggaggctgccattggagcccctcctactgccactgagggccctgagaccaaacctgtgcttatggctcttgcggagggtcctggtgctgagggtccccgcctggcctcacctagtggcagcaccagctcagggctggaggtggtggctcctgagggtacctcagccccaggtggtggcccgggaaccctggatgacagtgccaccatttgccgtgtctgccagaagccaggcgatctggttatgtgcaaccagtgtgagttttgtttccacctggactgtcacctgccggccctgcaggatgtaccaggggaggagtggagctgctcactctgccatgtgctccctgacctgaaggaggaggatggcagcctcagcctggatggtgcagacagcactggcgtggtggccaagctctcaccagccaaccagcggaaatgtgagcgtgtactgctggccctattctgtcacgaaccctgccgccccctgcatcagctggctaccgactccaccttctccctggaccagcccggtggcaccctggatctgaccctgatccgtgcccgcctccaggagaagttgtcacctccctacagctccccacaggagtttgcccaggatgtgggccgcatgttcaagcaattcaacaagttaactgaggacaaggcagacgtgcagtccatcatcggcctgcagcgcttcttcgagacgcgcatgaacgaggccttcggtgacaccaagttctctgctgtgctggtggagcccccgccgatgagcctgcctggtgctggcctgagttcccaggagctgtctggtggccctggtgatggcccctgaggctggagcccccatggccagcccagcctggctctgttctctgtcctgtcaccccatccccactcccctggtggcctgactcccactccctggtggccccatcccccagttcctcacgatatggtttttacttctgtggatttaataaaaacttcaccagttcctcaggcgttggctggttgggggactgtggtcctggggcctggtttattgactgt

SEQ ID NO: 1139 - DNA, 1585 bp, Homo sapiens
gcgagatccctactggctataaaggcagcgccccggagagctcttgcgcgtcttgttcttgcctggtgtcggtggttagtttctgcgacttgtgttgggactgctgataggaagatgtcttcaggaaatgctaaaattgggcaccctgcccccaacttcaaagccacagctgttatgccagatggtcagtttaaagatatcagcctgtctgactacaaaggaaaatatgttgtgttcttcttttaccctcttgacttcacctttgtgtgccccacggagatcattgctttcagtgatagggcagaagaatttaagaaactcaactgccaagtgattggtgcttctgtggattctcacttctgtcatctagcatgggtcaatacacctaagaaacaaggaggactgggacccatgaacattcctttggtatcagacccgaagcgcaccattgctcaggattatggggtcttaaaggctgatgaaggcatctcgttcaggggcctttttatcattgatgataagggtattcttcggcagatcactgtaaatgacctccctgttggccgctctgtggatgagactttgagactagttcaggccttccagttcactgacaaacatggggaagtgtgcccagctggctggaaacctggcagtgataccatcaagcctgatgtccaaaagagcaaagaatatttctccaagcagaagtgagcgctgggctgttttagtgccaggctgcggtgggcagccatgagaacaaaacctcttctgtattttttttttccattagtaaaacacaagacttcagattcagccgaattgtggtgtcttacaaggcaggcctttcctacagggggtggagagaccagcctttcttcctttggtaggaatggcctgagttggcgttgtgggcaggctactggtttgtatgatgtattagtagagcaacccattaatcttttgtagtttgtattaaacttgaactgagaccttgatgagtctttattttaggaagcatattattagcttttgattttaagaggaatttactccttgctttccctgttttggggaaaatgaggagagctgcctccaaatcagggaattatattgacacaggtagatatagggaatggaactgaatgaacccaaggtgttacattttgtttcactacacatgagggagaagaataagccctgctatagtgttggccagagcactgcgactgacgccacaggctgggttaccagttaaagtctcagtgtgactacttggacacctatttttgtttagacacactattcaaagggctgcatgggaaccagaagcttggcctcttctgataaatgcctggtacctgctatgtaaaagagctggaggtttctgttctttttgaactgacagaggaaagaggaagacaaggctggtggccttgggtagggctttcagtagttgcacagtactgggcaattcttagccttcccttggttctagccttgattagagatagtcttttttagtgtcattatgttgcccagagtggttctgaattccttgcctcaggtggtcctccgcctcagc

SEQ ID NO: 1140 - DNA, 1684 bp, Homo sapiens
atagaggccaggtgcggtggctcgcgcttacattcctagcactttgggaggccaaggcgggcggatcacctgaggtcaggcgttggagaccagcctagccaacatgatgaaacctcgtctctactaaaaatacaaaaaattagctgggcgtggtggtgcgtgcttgtagtcccagacactccggaggtgaggcgggagaatcgcttgagcccgggaggtggaggttgcagtaagccaacaccgtgccactgcactacagcctgggcgacaggctgataggaagatgtcttcaggaaatgctaaaattgggcaccctgcccccaacttcaaagccacagctgttatgccagatggtcagtttaaagatatcagcctgtctgactacaaaggaaaatatgttgtgttcttcttttaccctcttgacttcacctttgtgtgccccacggagatcattgctttcagtgatagggcagaagaatttaagaaactcaactgccaagtgattggtgcttctgtggattctcacttctgtcatctagcatgggtcaatacacctaagaaacaaggaggactgggacccatgaacattcctttggtatcagacccgaagcgcaccattgctcaggattatggggtcttaaaggctgatgaaggcatctcgttcaggggcctttttatcattgatgataagggtattcttcggcagatcactgtaaatgacctccctgttggccgctctgtggatgagactttgagactagttcaggccttccagttcactgacaaacatggggaagtgtgcccagctggctggaaacctggcagtgataccatcaagcctgatgtccaaaagagcaaagaatatttctccaagcagaagtgagcgctgggctgttttagtgccaggctgcggtgggcagccatgagaacaaaacctcttctgtattttttttttccattagtaaaacacaagacttcagattcagccgaattgtggtgtcttacaaggcaggcctttcctacagggggtggaatgtattagtagagcaacccattaatcttttgtagtttgtattaaacttgaactgagaccttgatgagtctttattttaggaagcatattattagcttttgattttaagaggaatttactccttgctttccctgttttggggaaaatgaggagagctgcctccaaatcagggaattatattgacacaggtagatatagggaatggaactgaatgaacccaaggtgttacattttgtttcactacacatgagggagaagaataagccctgctatagtgttggccagagcactgcgactgacgccacaggctgggttaccagttaaagtctcagtgtgactacttggacacctatttttgtttagacacactattcaaagggctgcatgggaaccagaagcttggcctcttctgataaatgcctggtacctgctatgtaaaagagctggaggtttctgttctttttgaactgacagaggaaagaggaagacaaggctggtggccttgggtagggctttcagtagttgcacagtactgggcaattcttagccttcccttggttctagccttgattagagatagtcttttttagtgtcattatgttgcccagagtggttctgaattccttgcctcaggtggtcctccgcctcagc

SEQ ID NO: 1141 - DNA, 1745 bp, Homo sapiens
gcctggtgtcggtggttagtttctgcgacttgtgttgggactggtgagtgtgggcagtgcggcccctgcggagtgaggcgcggcgcgcccttcttgcctgttgcctcttcctcctcctgtccggggcccgcccgcgctcgggtgggggtgctgtgatgcgtgaggcagccgggggaggcccggagtccgagactgcttgagcgctgcgcacacccctctcgtgggccccccacgtaggtgcgggaacctggttgaaccccaagctgataggaagatgtcttcaggaaatgctaaaattgggcaccctgcccccaacttcaaagccacagctgttatgccagatggtcagtttaaagatatcagcctgtctgactacaaaggaaaatatgttgtgttcttcttttaccctcttgacttcacctttgtgtgccccacggagatcattgctttcagtgatagggcagaagaatttaagaaactcaactgccaagtgattggtgcttctgtggattctcacttctgtcatctagcatgggtcaatacacctaagaaacaaggaggactgggacccatgaacattcctttggtatcagacccgaagcgcaccattgctcaggattatggggtcttaaaggctgatgaaggcatctcgttcaggggcctttttatcattgatgataagggtattcttcggcagatcactgtaaatgacctccctgttggccgctctgtggatgagactttgagactagttcaggccttccagttcactgacaaacatggggaagtgtgcccagctggctggaaacctggcagtgataccatcaagcctgatgtccaaaagagcaaagaatatttctccaagcagaagtgagcgctgggctgttttagtgccaggctgcggtgggcagccatgagaacaaaacctcttctgtattttttttttccattagtaaaacacaagacttcagattcagccgaattgtggtgtcttacaaggcaggcctttcctacagggggtggagagaccagcctttcttcctttggtaggaatggcctgagttggcgttgtgggcaggctactggtttgtatgatgtattagtagagcaacccattaatcttttgtagtttgtattaaacttgaactgagaccttgatgagtctttattttaggaagcatattattagcttttgattttaagaggaatttactccttgctttccctgttttggggaaaatgaggagagctgcctccaaatcagggaattatattgacacaggtagatatagggaatggaactgaatgaacccaaggtgttacattttgtttcactacacatgagggagaagaataagccctgctatagtgttggccagagcactgcgactgacgccacaggctgggttaccagttaaagtctcagtgtgactacttggacacctatttttgtttagacacactattcaaagggctgcatgggaaccagaagcttggcctcttctgataaatgcctggtacctgctatgtaaaagagctggaggtttctgttctttttgaactgacagaggaaagaggaagacaaggctggtggccttgggtagggctttcagtagttgcacagtactgggcaattcttagccttcccttggttctagccttgattagagatagtcttttttagtgtcattatgttgcccagagtggttctgaattccttgcctcaggtggtcctccgcctcagc

SEQ ID NO: 1142 - DNA, 937 bp, Homo sapiens
gttcttgcctggtgtcggtggttagtttctgcgacttgtgttgggactgctgataggaagatgtcttcaggaaatgctaaaattgggcaccctgcccccaacttcaaagccacagctgttatgccagatggtcagtttaaagatatcagcctgtctgactacaaaggaaaatatgttgtgttcttcttttaccctcttgacttcacctttgtgtgccccacggagatcattgctttcagtgatagggcagaagaatttaagaaactcaactgccaagtgattggtgcttctgtggattctcacttctgtcatctagcatgggtcaatacacctaagaaacaaggaggactgggacccatgaacattcctttggtatcagacccgaagcgcaccattgctcaggattatggggtcttaaaggctgatgaaggcatctcgttcaggggcctttttatcattgatgataagggtattcttcggcagatcactgtaaatgacctccctgttggccgctctgtggatgagactttgagactagttcaggccttccagttcactgacaaacatggggaagtgtgcccagctggctggaaacctggcagtgataccatcaagcctgatgtccaaaagagcaaagaatatttctccaagcagaagtgagcgctgggctgttttagtgccaggctgcggtgggcagccatgagaacaaaacctcttctgtattttttttttccattagtaaaacacaagacttcagattcagccgaattgtggtgtcttacaaggcaggcctttcctacagggggtggagagaccagcctttcttcctttggtaggaatggcctgagttggcgttgtgggcaggctactggtttgtatgatgtattagtagagcaacccattaatcttttgtagtttgtattaaacttgaactgag

SEQ ID NO: 1143 - DNA, 1754 bp, Homo sapiens
atagaggccaggtgcggtggctcgcgcttacattcctagcactttgggaggccaaggcgggcggatcacctgaggtcaggcgttggagaccagcctagccaacatgatgaaacctcgtctctactaaaaatacaaaaaattagctgggcgtggtggtgcgtgcttgtagtcccagacactccggaggtgaggcgggagaatcgcttgagcccgggaggtggaggttgcagtaagccaacaccgtgccactgcactacagcctgggcgacaggctgataggaagatgtcttcaggaaatgctaaaattgggcaccctgcccccaacttcaaagccacagctgttatgccagatggtcagtttaaagatatcagcctgtctgactacaaaggaaaatatgttgtgttcttcttttaccctcttgacttcacctttgtgtgccccacggagatcattgctttcagtgatagggcagaagaatttaagaaactcaactgccaagtgattggtgcttctgtggattctcacttctgtcatctagcatgggtcaatacacctaagaaacaaggaggactgggacccatgaacattcctttggtatcagacccgaagcgcaccattgctcaggattatggggtcttaaaggctgatgaaggcatctcgttcaggggcctttttatcattgatgataagggtattcttcggcagatcactgtaaatgacctccctgttggccgctctgtggatgagactttgagactagttcaggccttccagttcactgacaaacatggggaagtgtgcccagctggctggaaacctggcagtgataccatcaagcctgatgtccaaaagagcaaagaatatttctccaagcagaagtgagcgctgggctgttttagtgccaggctgcggtgggcagccatgagaacaaaacctcttctgtattttttttttccattagtaaaacacaagacttcagattcagccgaattgtggtgtcttacaaggcaggcctttcctacagggggtggagagaccagcctttcttcctttggtaggaatggcctgagttggcgttgtgggcaggctactggtttgtatgatgtattagtagagcaacccattaatcttttgtagtttgtattaaacttgaactgagaccttgatgagtctttattttaggaagcatattattagcttttgattttaagaggaatttactccttgctttccctgttttggggaaaatgaggagagctgcctccaaatcagggaattatattgacacaggtagatatagggaatggaactgaatgaacccaaggtgttacattttgtttcactacacatgagggagaagaataagccctgctatagtgttggccagagcactgcgactgacgccacaggctgggttaccagttaaagtctcagtgtgactacttggacacctatttttgtttagacacactattcaaagggctgcatgggaaccagaagcttggcctcttctgataaatgcctggtacctgctatgtaaaagagctggaggtttctgttctttttgaactgacagaggaaagaggaagacaaggctggtggccttgggtagggctttcagtagttgcacagtactgggcaattcttagccttcccttggttctagccttgattagagatagtcttttttagtgtcattatgttgcccagagtggttctgaattccttgcctcaggtggtcctccgcctcagc

SEQ ID NO: 1144 - DNA, 1960 bp, Homo sapiens
tcggtggttagtttctgcgacttgtgttgggactggtgagtgtgggcagtgcggcccctgcggagtgaggcgcggcgcgcccttcttgcctgttgcctcttcctcctcctgtccggggcccgcccgcgctcgggtgggggtgctgtgatgcgtgaggcagccgggggaggcccggagtccgagactgcttgagcgctgcgcacacccctctcgtgggccccccacgtaggtgcgggaacctggttgaaccccaaggcaagcgtggactcgagtcgagtcttcccccggcaactcgagcacgtggcgcggcgtctgggcgggctggtggtgggggtctccgagactagcctcctgccggacggggtgggttcgggaagcttctggaatggacctgtatccagactcgtggctgtagaagacagcctctatgtatttggctgttccgggtcctgagccttgactagctgcggagcttcggctgataggaagatgtcttcaggaaatgctaaaattgggcaccctgcccccaacttcaaagccacagctgttatgccagatggtcagtttaaagatatcagcctgtctgactacaaaggaaaatatgttgtgttcttcttttaccctcttgacttcacctttgtgtgccccacggagatcattgctttcagtgatagggcagaagaatttaagaaactcaactgccaagtgattggtgcttctgtggattctcacttctgtcatctagcatgggtcaatacacctaagaaacaaggaggactgggacccatgaacattcctttggtatcagacccgaagcgcaccattgctcaggattatggggtcttaaaggctgatgaaggcatctcgttcaggggcctttttatcattgatgataagggtattcttcggcagatcactgtaaatgacctccctgttggccgctctgtggatgagactttgagactagttcaggccttccagttcactgacaaacatggggaagtgtgcccagctggctggaaacctggcagtgataccatcaagcctgatgtccaaaagagcaaagaatatttctccaagcagaagtgagcgctgggctgttttagtgccaggctgcggtgggcagccatgagaacaaaacctcttctgtattttttttttccattagtaaaacacaagacttcagattcagccgaattgtggtgtcttacaaggcaggcctttcctacagggggtggagagaccagcctttcttcctttggtaggaatggcctgagttggcgttgtgggcaggctactggtttgtatgatgtattagtagagcaacccattaatcttttgtagtttgtattaaacttgaactgagaccttgatgagtctttattttaggaagcatattattagcttttgattttaagaggaatttactccttgctttccctgttttggggaaaatgaggagagctgcctccaaatcagggaattatattgacacaggtagatatagggaatggaactgaatgaacccaaggtgttacattttgtttcactacacatgagggagaagaataagccctgctatagtgttggccagagcactgcgactgacgccacaggctgggttaccagttaaagtctcagtgtgactacttggacacctatttttgtttagacacactattcaaagggctgcatgggaaccagaagcttggcctcttctgataaatgcctggtacctgctatgtaaaagagctggaggtttctgttctttttgaactgacagaggaaagaggaagacaaggctggtggccttgggtagggctttcagtagttgcacagtactgggcaattcttagccttcccttggttctagccttgattagagatagtcttttttagtgtcattatgttgcccagagtggttctgaattccttgcctcaggtggtcctccgcctcagc

SEQ ID NO: 1145 - DNA, 1890 bp, Homo sapiens
tcggtggttagtttctgcgacttgtgttgggactggtgagtgtgggcagtgcggcccctgcggagtgaggcgcggcgcgcccttcttgcctgttgcctcttcctcctcctgtccggggcccgcccgcgctcgggtgggggtgctgtgatgcgtgaggcagccgggggaggcccggagtccgagactgcttgagcgctgcgcacacccctctcgtgggccccccacgtaggtgcgggaacctggttgaaccccaaggcaagcgtggactcgagtcgagtcttcccccggcaactcgagcacgtggcgcggcgtctgggcgggctggtggtgggggtctccgagactagcctcctgccggacggggtgggttcgggaagcttctggaatggacctgtatccagactcgtggctgtagaagacagcctctatgtatttggctgttccgggtcctgagccttgactagctgcggagcttcggctgataggaagatgtcttcaggaaatgctaaaattgggcaccctgcccccaacttcaaagccacagctgttatgccagatggtcagtttaaagatatcagcctgtctgactacaaaggaaaatatgttgtgttcttcttttaccctcttgacttcacctttgtgtgccccacggagatcattgctttcagtgatagggcagaagaatttaagaaactcaactgccaagtgattggtgcttctgtggattctcacttctgtcatctagcatgggtcaatacacctaagaaacaaggaggactgggacccatgaacattcctttggtatcagacccgaagcgcaccattgctcaggattatggggtcttaaaggctgatgaaggcatctcgttcaggggcctttttatcattgatgataagggtattcttcggcagatcactgtaaatgacctccctgttggccgctctgtggatgagactttgagactagttcaggccttccagttcactgacaaacatggggaagtgtgcccagctggctggaaacctggcagtgataccatcaagcctgatgtccaaaagagcaaagaatatttctccaagcagaagtgagcgctgggctgttttagtgccaggctgcggtgggcagccatgagaacaaaacctcttctgtattttttttttccattagtaaaacacaagacttcagattcagccgaattgtggtgtcttacaaggcaggcctttcctacagggggtggaatgtattagtagagcaacccattaatcttttgtagtttgtattaaacttgaactgagaccttgatgagtctttattttaggaagcatattattagcttttgattttaagaggaatttactccttgctttccctgttttggggaaaatgaggagagctgcctccaaatcagggaattatattgacacaggtagatatagggaatggaactgaatgaacccaaggtgttacattttgtttcactacacatgagggagaagaataagccctgctatagtgttggccagagcactgcgactgacgccacaggctgggttaccagttaaagtctcagtgtgactacttggacacctatttttgtttagacacactattcaaagggctgcatgggaaccagaagcttggcctcttctgataaatgcctggtacctgctatgtaaaagagctggaggtttctgttctttttgaactgacagaggaaagaggaagacaaggctggtggccttgggtagggctttcagtagttgcacagtactgggcaattcttagccttcccttggttctagccttgattagagatagtcttttttagtgtcattatgttgcccagagtggttctgaattccttgcctcaggtggtcctccgcctcagc

SEQ ID NO: 1146 - DNA, 1183 bp, Homo sapiens
  misc_feature (1140)..(1140): n is a, c, g, or t
cgcccaagaagaaaatggccataagtggagtccctgtgctaggatttttcatcatagctgtgctgatgagcgctcaggaatcatgggctatcaaagaagaacatgtgatcatccaggccgagttctatctgaatcctgaccaatcaggcgagtttatgtttgactttgatggtgatgagattttccatgtggatatggcaaagaaggagacggtctggcggcttgaagaatttggacgatttgccagctttgaggctcaaggtgcattggccaacatagctgtggacaaagccaacttggaaatcatgacaaagcgctccaactatactccgatcaccaatgtacctccagaggtaactgtgctcacgaacagccctgtggaactgagagagcccaacgtcctcatctgtttcatcgacaagttcaccccaccagtggtcaatgtcacgtggcttcgaaatggaaaacctgtcaccacaggagtgtcagagacagtcttcctgcccagggaagaccaccttttccgcaagttccactatctccccttcctgccctcaactgaggacgtttacgactgcagggtggagcactggggcttggatgagcctcttctcaagcactgggagtttgatgctccaagccctctcccagagactacagagaacgtggtgtgtgccctgggcctgactgtgggtctggtgggcatcattattgggaccatcttcatcatcaagggagtgcgcaaaagcaatgcagcagaacgcagggggcctctgtaaggcacatggaggtgatgatgtttcttagagagaagatcactgaagaaacttctgctttaatgactttacaaagctggcaatattacaatccttgacctcagtgaaagcagtcatcttcagcgttttccagccctatagccaccccaagtgtggttatgcctcctcgattgctccgtactctaacatctagctggcttccctgtctattgccttttcctgtatctattttcctctatttcctatcattttattatcaccatgcaatgcctctggaataaaacatacaggagtctgtctctgctatggaatgccccatggggcatctcttgtgtacttattgtttaaggtttcctcaaactgngattcttctgaacacaataaactattttgatgatcttgggtgg

SEQ ID NO: 1147 - DNA, 1253 bp, Homo sapiens
cacattctcttttcttttattcttgtctgttctgcctcactcccgagctctactgactcccaacagagcgcccaagaagaaaatggccataagtggagtccctgtgctaggatttttcatcatagctgtgctgatgagcgctcaggaatcatgggctatcaaagaagaacatgtgatcatccaggccgagttctatctgaatcctgaccaatcaggcgagtttatgtttgactttgatggtgatgagattttccatgtggatatggcaaagaaggagacggtctggcggcttgaagaatttggacgatttgccagctttgaggctcaaggtgcattggccaacatagctgtggacaaagccaacctggaaatcatgacaaagcgctccaactatactccgatcaccaatgtacctccagaggtaactgtgctcacgaacagccctgtggaactgagagagcccaacgtcctcatctgtttcatcgacaagttcaccccaccagtggtcaatgtcacgtggcttcgaaatggaaaacctgtcaccacaggagtgtcagagacagtcttcctgcccagggaagaccaccttttccgcaagttccactatctccccttcctgccctcaactgaggacgtttacgactgcagggtggagcactggggcttggatgagcctcttctcaagcactgggagtttgatgctccaagccctctcccagagactacagagaacgtggtgtgtgccctgggcctgactgtgggtctggtgggcatcattattgggaccatcttcatcatcaagggagtgcgcaaaagcaatgcagcagaacgcagggggcctctgtaaggcacatggaggtgatggtgtttcttagagagaagatcactgaagaaacttctgctttaatgactttacaaagctggcaatattacaatccttgacctcagtgaaagcagtcatcttcagcgttttccagccctatagccaccccaagtgtggttatgcctcctcgattgctccgtactctaacatctagctggcttccctgtctattgccttttcctgtatctattttcctctatttcctatcattttattatcaccatgcaatgcctctggaataaaacatacaggagtctgtctctgctatggaatgccccatggggcatctcttgtgtacttattgtttaaggtttcctcaaactgtgatttttctgaacacaataaactattttgatgatcttgggtggaa

SEQ ID NO: 1148 - DNA, 1200 bp, Homo sapiens
cacattctcttttcttttattcttgtctgttctgcctcactcccgagctctactgactcccaacagagcgcccaagaagaaaatggccataagtggagtccctgtgctaggatttttcatcatagctgtgctgatgagcgctcaggaatcatgggctatcaaagaagaacatgtgatcatccaggccgagttctatctgaatcctgaccaatcaggcgagtttatgtttgactttgatggtgatgagattttccatgtggatatggcaaagaaggagacggtctggcggcttgaagaatttggacgatttgccagctttgaggctcaaggtgcattggccaacatagctgtggacaaagccaacctggaaatcatgacaaagcgctccaactatactccgatcaccaatgtacctccagaggtaactgtgctcacgaacagccctgtggaactgagagagcccaacgtcctcatctgtttcatcgacaagttcaccccaccagtggtcaatgtcacgtggcttcgaaatggaaaacctgtcaccacaggagtgtcagagacagtcttcctgcccagggaagaccaccttttccgcaagttccactatctccccttcctgccctcaactgaggacgtttacgactgcagggtggagcactggggcttggatgagcctcttctcaagcactgggagtttgatgctccaagccctctcccagagactacagagaacgtggtgtgtgccctgggcctgactgtgggtctggtgggcatcattattgggaccatcttcatcatcaagggagtgatggtgtttcttagagagaagatcactgaagaaacttctgctttaatgactttacaaagctggcaatattacaatccttgacctcagtgaaagcagtcatcttcagcgttttccagccctatagccaccccaagtgtggttatgcctcctcgattgctccgtactctaacatctagctggcttccctgtctattgccttttcctgtatctattttcctctatttcctatcattttattatcaccatgcaatgcctctggaataaaacatacaggagtctgtctctgctatggaatgccccatggggcatctcttgtgtacttattgtttaaggtttcctcaaactgtgatttttctgaacacaataaactattttgatgatcttgggtggaa

SEQ ID NO: 1149 - DNA, 1331 bp, Homo sapiens
cacattctcttttcttttattcttgtctgttctgcctcactcccgagctctactgactcccaacagagcgcccaagaagaaaatggccataagtggagtccctgtgctaggatttttcatcatagctgtgctgatgagcgctcaggaatcatgggctatcaaagagcaacattggtgctgttgtaaagatgtactgtagaaaagtattcttcacccagcatgacccccacagaaggtgtcagaagaacatgtgatcatccaggccgagttctatctgaatcctgaccaatcaggcgagtttatgtttgactttgatggtgatgagattttccatgtggatatggcaaagaaggagacggtctggcggcttgaagaatttggacgatttgccagctttgaggctcaaggtgcattggccaacatagctgtggacaaagccaacctggaaatcatgacaaagcgctccaactatactccgatcaccaatgtacctccagaggtaactgtgctcacgaacagccctgtggaactgagagagcccaacgtcctcatctgtttcatcgacaagttcaccccaccagtggtcaatgtcacgtggcttcgaaatggaaaacctgtcaccacaggagtgtcagagacagtcttcctgcccagggaagaccaccttttccgcaagttccactatctccccttcctgccctcaactgaggacgtttacgactgcagggtggagcactggggcttggatgagcctcttctcaagcactgggagtttgatgctccaagccctctcccagagactacagagaacgtggtgtgtgccctgggcctgactgtgggtctggtgggcatcattattgggaccatcttcatcatcaagggagtgcgcaaaagcaatgcagcagaacgcagggggcctctgtaaggcacatggaggtgatggtgtttcttagagagaagatcactgaagaaacttctgctttaatgactttacaaagctggcaatattacaatccttgacctcagtgaaagcagtcatcttcagcgttttccagccctatagccaccccaagtgtggttatgcctcctcgattgctccgtactctaacatctagctggcttccctgtctattgccttttcctgtatctattttcctctatttcctatcattttattatcaccatgcaatgcctctggaataaaacatacaggagtctgtctctgctatggaatgccccatggggcatctcttgtgtacttattgtttaaggtttcctcaaactgtgatttttctgaacacaataaactattttgatgatcttgggtggaa

SEQ ID NO: 1150 - DNA, 4237 bp, Homo sapiens
cagctcggtcgcccccaccggccccatggcagcccccggcgccccagctgagtacggctacatccggaccgtcctgggccagcagatcctgggacaactggacagctccagcctggcgctgccctccgaggccaagctgaagctggcggggagcagcggccgcggcggccagacagtcaagagcctgcggatccaggagcaggtgcagcagaccctcgcccggaagggccgcagctccgtgggcaacggaaatcttcaccgaaccagcagtgttcctgagtatgtctacaacctacacttggttgaaaatgattttgttggaggccgttcccctgttcctaaaacctatgacatgctaaaggctggcacaactgccacttatgaaggtcgctggggaagaggaacagcacagtacagctcccagaagtccgtggaagaaaggtccttgaggcatcctctgaggagactggagatttctcctgacagcagcccggagagggctcactacacgcacagcgattaccagtacagccagagaagccaggctgggcacaccctgcaccaccaagaaagcaggcgggccgccctcctagtgccaccgagatatgctcgttccgagatcgtgggggtcagccgtgctggcaccacaagcaggcagcgccactttgacacataccacagacagtaccagcatggctctgttagcgacaccgtttttgacagcatccctgccaacccggccctgctcacgtaccccaggccagggaccagccgcagcatgggcaacctcttggagaaggagaactacctgacggcagggctcactgtcgggcaggtcaggccgctggtgcccctgcagcccgtcactcagaacagggcttccaggtcctcctggcatcagagctccttccacagcacccgcacgctgagggaagctgggcccagtgtcgccgtggattccagcgggaggagagcgcacttgactgtcggccaggcggccgcagggggaagtgggaatctgctcactgagagaagcactttcactgactcccagctggggaatgcagacatggagatgactctggagcgagcagtgagtatgctcgaggcagaccacatgccgccatccaggatttctgctgcagctactttcatacagcacgagtgcttccagaaatctgaagctcggaagagggttaaccagcttcgtggcatcctcaagcttctgcagctcctaaaagttcagaatgaagacgttcagcgagctgtgtgtggggccttgagaaacttagtatttgaagacaatgacaacaaattggaggtggctgaactaaatggggtacctcggctgctccaggtgctgaagcaaaccagagacttggagactaaaaaacaaataacagaccatacagtcaatttaagaagtaggaatggctggccgggcgcggtggctcacgcctgtaatcccagcactttgggaggccaaggcgggcggatcacgaggtcaggagttcgagaccagcctgaccaacatggtttgctgtggaatttgtcatctaatgacaaactcaagaatctcatgataacagaagcattgcttacgctgacggagaatatcatcatccccttttctgggtggcctgaaggagactacccaaaagcaaatggtttgctcgattttgacatattctacaacgtcactggatgcctaagaaacatgagttctgctggcgctgatgggagaaaagcgatgagaagatgtgacggactcattgactcactggtccattatgtcagaggaaccattgcagattaccagccagatgacaaggccacggagaattgtgtgtgcattcttcataacctctcctaccagctggaggcagagctcccagagaaatattcccagaatatctatattcaaaaccggaatatccagactgacaacaacaaaagtattggatgttttggcagtcgaagcaggaaagtaaaagagcaataccaggacgtgccgatgccggaggaaaagagcaaccccaagggcgtggagtggctgtggcattccattgttataaggatgtatctgtccttgatcgccaaaagtgtccgcaactacacacaagaagcatccttaggagctctgcagaacctcacggccggaagtggaccaatgccgacatcagtggctcagacagttgtccagaaggaaagtggcctgcagcacacccgaaagatgctgcatgttggtgacccaagtgtgaaaaagacagccatctcgctgctgaggaatctgtcccggaatctttctctgcagaatgaaattgccaaagaaactctccctgatttggtttccatcattcctgacacagtcccgagtactgaccttctcattgaaactacagcctctgcctgttacacattgaacaacataatccaaaacagttaccagaatgcacgcgaccttctaaacaccgggggcatccagaaaattatggccattagtgcaggcgatgcctatgcctccaacaaagcaagtaaagctgcttccgtccttctgtattctctgtgggcacacacggaactgcatcatgcctacaagaaggctcagtttaagaagacagattttgtcaacagccggactgccaaagcctaccactcccttaaagactgaggaaaatgacaaagtattctcggctgcaaaaatccccaaaggaaaacacctatttttctactacccagcccaagaaacctcaaaagcatgccttgtttctatctttctctatttccgtggtcccctgaatccagaaaacaaatagaacataattttatgagtcttccagaagacctttgcaagtttgccaccagtagataccggccacaggctcgacaaatagtggtctttgttattagggcttatggtagatggcttcctggaatcaaaatgtgaattcatgtggaagggacattaatccaataaataaggaaagaagctgttgcattactgggattttaaaagtttgatttacatttatattccttttctggttcccatgttttgtcactcatgtgcacattgcttcgccattgggcctccagtgtattgttctgcagtgttgaaacagaatggaaatgacaagaaatatctgcagttatccaggagaaagtataatggcaaaattattggtttctttctttactttgtgcttgtttttatccccttggttgtttttctctgatttttaaataaacttaagaaatttagattacagagtatgcatgactgtaagaaaaagaaattgagaggaagtgatcatagcaaattaaagaagtcttttcctcccagaacttaaagtaaaataaaaaataaataaataaataaaatcttttccacagagaaaggcaactgtgatgataaaatttaagctcccccaacactgagtcaatgagatttttctcaggagatactttacctataacaacgccgttaaatccaaatctcttctaaacgatggcattctatgtaatgcctttcctggacttttttggccactgcctggactagtgaaagaatggactctatctttatctgcaagaggaactaaggccttctatcagactgcctggccagcctggggcactgaaaatacggctcatgttaatgagttacattatcagccagcccagccttgcccaccatttaagaaatatcacagagccactagatctcatatgatcttcttcaagccattattttaactcaagaaaactctagagaagaaaagtgaagaagtcatgttgaagaagatgtaagaatgtgtcaagaccatccagaaatgatatgagaaatactgatattttaaatggttgacatcatccagcgaaatgaatctacattaaatgttgttttaactgcgctatgattaaaaccattcatatagagttagtctttacaactactattctgttatttttttttttaatctgacaacatttgtcctaagtaagataagcaaaaaaattcttcaactccttttggcaagaaaactgtaacagaaaataaattttgaatgtgtacttaagtctttattatatttgaagcaattttttttcaattttaaaagctgaatgaagacaacttaggttgctaacctagttcaaaatgaaattatttagataccaatttttaaaatactggagagaatttatatgtctttttccagagttctgatgataagca

SEQ ID NO: 1151 - DNA, 4177 bp, Homo sapiens
aggggcggggccggactcgagcggggcggggctcgcgccagcgcccccagctccgtggcggcttcgcccgcgagtccagaggcaggcgagcagctcggtcgcccccaccggccccatggcagcccccggcgccccagctgagtacggctacatccggaccgtcctgggccagcagatcctgggacaactggacagctccagcctggcgctgccctccgaggccaagctgaagctggcggggagcagcggccgcggcggccagacagtcaagagcctgcggatccaggagcaggtgcagcagaccctcgcccggaagggccgcagctccgtgggcaacggaaatcttcaccgaaccagcagtgttcctgagtatgtctacaacctacacttggttgaaaatgattttgttggaggccgttcccctgttcctaaaacctatgacatgctaaaggctggcacaactgccacttatgaaggtcgctggggaagaggaacagcacagtacagctcccagaagtccgtggaagaaaggtccttgaggcatcctctgaggagactggagatttctcctgacagcagcccggagagggctcactacacgcacagcgattaccagtacagccagagaagccaggctgggcacaccctgcaccaccaagaaagcaggcgggccgccctcctagtgccaccgagatatgctcgttccgagatcgtgggggtcagccgtgctggcaccacaagcaggcagcgccactttgacacataccacagacagtaccagcatggctctgttagcgacaccgtttttgacagcatccctgccaacccggccctgctcacgtaccccaggccagggaccagccgcagcatgggcaacctcttggagaaggagaactacctgacggcagggctcactgtcgggcaggtcaggccgctggtgcccctgcagcccgtcactcagaacagggcttccaggtcctcctggcatcagagctccttccacagcacccgcacgctgagggaagctgggcccagtgtcgccgtggattccagcgggaggagagcgcacttgactgtcggccaggcggccgcagggggaagtgggaatctgctcactgagagaagcactttcactgactcccagctggggaatgcagacatggagatgactctggagcgagcagtgagtatgctcgaggcagaccacatgctgccatccaggatttctgctgcagctactttcatacagcacgagtgcttccagaaatctgaagctcggaagagggttaaccagcttcgtggcatcctcaagcttctgcagctcctaaaagttcagaatgaagacgttcagcgagctgtgtgtggggccttgagaaacttagtatttgaagacaatgacaacaaattggaggtggctgaactaaatggggtacctcggctgctccaggtgctgaagcaaaccagagacttggagactaaaaaacaaataacaggtttgctgtggaatttgtcatctaatgacaaactcaagaatctcatgataacagaagcattgcttacgctgacggagaatatcatcatccccttttctgggtggcctgaaggagactacccaaaagcaaatggtttgctcgattttgacatattctacaacgtcactggatgcctaagaaacatgagttctgctggcgctgatgggagaaaagcgatgagaagatgtgacggactcattgactcactggtccattatgtcagaggaaccattgcagattaccagccagatgacaaggccacggagaattgtgtgtgcattcttcataacctcaataccaggacgtgccgatgccggaggaaaagagcaaccccaagggcgtggagtggctgtggcattccattgttataaggatgtatctgtccttgatcgccaaaagtgtccgcaactacacacaagaagcatccttaggagctctgcagaacctcacggccggaagtggaccaatgccgacatcagtggctcagacagttgtccagaaggaaagtggcctgcagcacacccgaaagatgctgcatgttggtgacccaagtgtgaaaaagacagccatctcgctgctgaggaatctgtcccggaatctttctctgcagaatgaaattgccaaagaaactctccctgatttggtttccatcattcctgacacagtcccgagtactgaccttctcattgaaactacagcctctgcctgttacacattgaacaacataatccaaaacagttaccagaatgcacgcgaccttctaaacaccgggggcatccagaaaattatggccattagtgcaggcgatgcctatgcctccaacaaagcaagtaaagctgcttccgtccttctgtattctctgtgggcacacacggaactgcatcatgcctacaagaaggctcagtttaagaagacagattttgtcaacagccggactgccaaagcctaccactcccttaaagactgaggaaaatgacaaagtattctcggctgcaaaaatccccaaaggaaaacacctatttttctactacccagcccaagaaacctcaaaagcatgccttgtttctatccttctctatttccgtggtcccctgaatccagaaaacaaatagaacataattttatgagtcttccagaagacctttgcaagtttgccaccagtagataccggccacaggctcgacaaatagtggtctttgttattagggcttatggtacatggcttcctggaatcaaaatgtgaattcatgtggaagggacattaatccaataaataaggaaagaagctgttgcattactgggattttaaaagtttgatttacatttatattccttttctggttcccatgttttgtcactcatgtgcacattgcttcgccattgggcctccagtgtattgttctgcagtgttgaaacagaatggaaatgacaagaaatatctgcagttatccaggagaaagtataatggcaaaattattggtttctttctttactttgtgcttgtttttatccccttgggttgtttttctctgatttttaaataaacttaagaaatttagattacagagtatgcatgactgtaagaaaaagaaattgagaggaagtgatcatagcaaattaaagaagtcttttcctcccagaacttaaagtaaaataaaaaataaataaataaataaaatcttttccacagagaaaggcaactgtgatgataaaatttaacgttcccccaaacactgagtcaatgagatttttctcaggagatactttacctataacaacgccgttaaatccaaatctcttctaaacgatggcattctatgtaatgcctttcctggacttttttggccactgccctggactagtgaaagaatggactctatctttatctgcaagaggaactaaggccttctctcagactgcctggccagcctggggcactgaaaatacggctcatgttaatgagttacattatcagccagcccagccttgcccaccatttaagaaatatcacagagccactagatctcatatgatcttcttcaagccattattttaactcaagaaaactctagagaagaaaagtgaagaagtcatgttgaagaagatgtaagaatgtgtcaagaccatccagaaatgatatgagaaatactgatattttaaatggttgacatcatccagcgaaatgaatctacattaaatgttgttttaactgcgctatgattaaaaccattcatatagagttagtctttacaactactattctgttatttttttttttaatctgacaacatttgtcctaagtaagataagcaaaaaaattcttcaactccttttggcaagaaaactgtaacagaaaataaattttgaatgtgtacttaagtctttattatatttgaagcaattttttttcaattttaaaagctgaatgaagacaacttaggttgctaacctagttcaaaatgaaattatttagataccaatttttaaaatactggagagaatttatatgtctttttccagagttctgatgataagcatttggagtgcatttattcctccagataataaatgtgtgttcagaactttttgtgttttttaaggcattaataaagccttcgataatattaaatacaaaatgagaccaa

SEQ ID NO: 1152 - DNA, 3418 bp, Homo sapiens
aggggcggggccggactcgagcggggcggggctcgcgccagcgcccccagctccgtggcggcttcgcccgcgagtccagaggcaggcgagcagctcggtcgcccccaccggccccatggcagcccccggcgccccagctgagtacggctacatccggaccgtcctgggccagcagatcctgggacaactggacagctccagcctggcgctgccctccgaggccaagctgaagctggcggggagcagcggccgcggcggccagacagtcaagagcctgcggatccaggagcaggtgcagcagaccctcgcccggaagggccgcagctccgtgggcaacggaaatcttcaccgaaccagcagtgttcctgagtatgtctacaacctacacttggttgaaaatgattttgttggaggccgttcccctgttcctaaaacctatgacatgctaaaggctggcacaactgccacttatgaaggtcgctggggaagaggaacagcacagtacagctcccagaagtccgtggaagaaaggtccttgaggcatcctctgaggagactggagatttctcctgacagcagcccggagagggctcactacacgcacagcgattaccagtacagccagagaagccaggctgggcacaccctgcaccaccaagaaagcaggcgggccgccctcctagtgccaccgagatatgctcgttccgagatcgtgggggtcagccgtgctggcaccacaagcaggcagcgccactttgacacataccacagacagtaccagcatggctctgttagcgacaccgtttttgacagcatccctgccaacccggccctgctcacgtaccccaggccagggaccagccgcagcatgggcaacctcttggagaaggagaactacctgacggcagggctcactgtcgggcaggtcaggccgctggtgcccctgcagcccgtcactcagaacagggcttccaggtcctcctggcatcagagctccttccacagcacccgcacgctgagggaagctgggcccagtgtcgccgtggattccagcgggaggagagcgcacttgactgtcggccaggcggccgcagggggaagtgggaatctgctcactgagagaagcactttcactgactcccagctggggaatgcagacatggagatgactctggagcgagcagtgagtatgctcgaggcagaccacatgctgccatccaggatttctgctgcagctactttcatacagcacgagtgcttccagaaatctgaagctcggaagagggttaaccagcttcgtggcatcctcaagcttctgcagctcctaaaagttcagaatgaagacgttcagcgagctgtgtgtggggccttgagaaacttagtatttgaagacaatgacaacaaattggaggtggctgaactaaatggggtacctcggctgctccaggtgctgaagcaaaccagagacttggagactaaaaaacaaataacagaccatacagtcaatttaagaagtaggaatggctggccgggcgcggtggctcacgcctgtaatcccagcactttgggaggccaaggcgggcggatcacgaggtcaggagttcgagaccagcctgaccaacatggtttgctgtggaatttgtcatctaatgacaaactcaagaatctcatgataacagaagcattgcttacgctgacggagaatatcatcatccccttttctgggtggcctgaaggagactacccaaaagcaaatggtttgctcgattttgacatattctacaacgtcactggatgcctaagaaacatgagttctgctggcgctgatgggagaaaagcgatgagaagatgtgacggactcattgactcactggtccattatgtcagaggaaccattgcagattaccagccagatgacaaggccacggagaattgtgtgtgcattcttcataacctctcctaccagctggaggcagagctcccagagaaatattcccagaatatctatattcaaaaccggaatatccagactgacaacaacaaaagtattggatgttttggcagtcgaagcaggaaagtaaaagagcaataccaggacgtgccgatgccggaggaaaagagcaaccccaagggcgtggagtggctgtggcattccattgttataaggatgtatctgtccttgatcgccaaaagtgtccgcaactacacacaagaagcatccttaggagctctgcagaacctcacggccggaagtggaccaatgccgacatcagtggctcagacagttgtccagaaggaaagtggcctgcagcacacccgaaagatgctgcatgttggtgacccaagtgtgaaaaagacagccatctcgctgctgaggaatctgtcccggaatctttctctgcagaatgaaattgccaaagaaactctccctgatttggtttccatcattcctgacacagtcccgagtactgaccttctcattgaaactacagcctctgcctgttacacattgaacaacataatccaaaacagttaccagaatgcacgcgaccttctaaacaccgggggcatccagaaaattatggccattagtgcaggcgatgcctatgcctccaacaaagcaagtaaagctgcttccgtccttctgtattctctgtgggcacacacggaactgcatcatgcctacaagaaggctcagtttaagaagacagattttgtcaacagccggactgccaaagcctaccactcccttaaagactgaggaaaatgacaaagtattctcggctgcaaaaatccccaaaggaaaacacctatttttctactacccagcccaagaaacctcaaaagcatgccttgtttctatccttctctatttccgtggtcccctgaatccagaaaacaaatagaacataattttatgagtcttccagaagacctttgcaagtttgccattcctggaatcaaaatgtgaattcatgtggaagggacattaatccaataaataaggaaagaagctgttgcattactgggattttaaaagtttgatttacatttatattccttttctggttcccatgttttgtcactcatgtgcacattgcttcgccattgggcctccagtgtattgttctgcagtgttgaaacagaatggaaatgacaagaaatatctgcagttatccaggagaaagtataatggcaaaattattggtttctttctttactttgtgcttgtttttatccccttgggttgtttttctctgatttttaaataaacttaagaaatttagattacagagtatgcatgactgtaagaaaaagaaattgagaggaagtgatcatagcaaattaaagaagtcttttcctcccagaacttaaagtaaaataaaaaataaataaataaataaaatcttttccacag

SEQ ID NO: 1153 - DNA, 3286 bp, Homo sapiens
aggggcggggccggactcgagcggggcggggctcgcgccagcgcccccagctccgtggcggcttcgcccgcgagtccagaggcaggcgagcagctcggtcgcccccaccggccccatggcagcccccggcgccccagctgagtacggctacatccggaccgtcctgggccagcagatcctgggacaactggacagctccagcctggcgctgccctccgaggccaagctgaagctggcggggagcagcggccgcggcggccagacagtcaagagcctgcggatccaggagcaggtgcagcagaccctcgcccggaagggccgcagctccgtgggcaacggaaatcttcaccgaaccagcagtgttcctgagtatgtctacaacctacacttggttgaaaatgattttgttggaggccgttcccctgttcctaaaacctatgacatgctaaaggctggcacaactgccacttatgaaggtcgctggggaagaggaacagcacagtacagctcccagaagtccgtggaagaaaggtccttgaggcatcctctgaggagactggagatttctcctgacagcagcccggagagggctcactacacgcacagcgattaccagtacagccagagaagccaggctgggcacaccctgcaccaccaagaaagcaggcgggccgccctcctagtgccaccgagatatgctcgttccgagatcgtgggggtcagccgtgctggcaccacaagcaggcagcgccactttgacacataccacagacagtaccagcatggctctgttagcgacaccgtttttgacagcatccctgccaacccggccctgctcacgtaccccaggccagggaccagccgcagcatgggcaacctcttggagaaggagaactacctgacggcagggctcactgtcgggcaggtcaggccgctggtgcccctgcagcccgtcactcagaacagggcttccaggtcctcctggcatcagagctccttccacagcacccgcacgctgagggaagctgggcccagtgtcgccgtggattccagcgggaggagagcgcacttgactgtcggccaggcggccgcagggggaagtgggaatctgctcactgagagaagcactttcactgactcccagctggggaatgcagacatggagatgactctggagcgagcagtgagtatgctcgaggcagaccacatgctgccatccaggatttctgctgcagctactttcatacagcacgagtgcttccagaaatctgaagctcggaagagggttaaccagcttcgtggcatcctcaagcttctgcagctcctaaaagttcagaatgaagacgttcagcgagctgtgtgtggggccttgagaaacttagtatttgaagacaatgacaacaaattggaggtggctgaactaaatggggtacctcggctgctccaggtgctgaagcaaaccagagacttggagactaaaaaacaaataacaggtttgctgtggaatttgtcatctaatgacaaactcaagaatctcatgataacagaagcattgcttacgctgacggagaatatcatcatccccttttctgggtggcctgaaggagactacccaaaagcaaatggtttgctcgattttgacatattctacaacgtcactggatgcctaagaaacatgagttctgctggcgctgatgggagaaaagcgatgagaagatgtgacggactcattgactcactggtccattatgtcagaggaaccattgcagattaccagccagatgacaaggccacggagaattgtgtgtgcattcttcataacctctcctaccagctggaggcagagctcccagagaaatattcccagaatatctatattcaaaaccggaatatccagactgacaacaacaaaagtattggatgttttggcagtcgaagcaggaaagtaaaagagcaataccaggacgtgccgatgccggaggaaaagagcaaccccaagggcgtggagtggctgtggcattccattgttataaggatgtatctgtccttgatcgccaaaagtgtccgcaactacacacaagaagcatccttaggagctctgcagaacctcacggccggaagtggaccaatgccgacatcagtggctcagacagttgtccagaaggaaagtggcctgcagcacacccgaaagatgctgcatgttggtgacccaagtgtgaaaaagacagccatctcgctgctgaggaatctgtcccggaatctttctctgcagaatgaaattgccaaagaaactctccctgatttggtttccatcattcctgacacagtcccgagtactgaccttctcattgaaactacagcctctgcctgttacacattgaacaacataatccaaaacagttaccagaatgcacgcgaccttctaaacaccgggggcatccagaaaattatggccattagtgcaggcgatgcctatgcctccaacaaagcaagtaaagctgcttccgtccttctgtattctctgtgggcacacacggaactgcatcatgcctacaagaaggctcagtttaagaagacagattttgtcaacagccggactgccaaagcctaccactcccttaaagactgaggaaaatgacaaagtattctcggctgcaaaaatccccaaaggaaaacacctatttttctactacccagcccaagaaacctcaaaagcatgccttgtttctatccttctctatttccgtggtcccctgaatccagaaaacaaatagaacataattttatgagtcttccagaagacctttgcaagtttgccattcctggaatcaaaatgtgaattcatgtggaagggacattaatccaataaataaggaaagaagctgttgcattactgggattttaaaagtttgatttacatttatattccttttctggttcccatgttttgtcactcatgtgcacattgcttcgccattgggcctccagtgtattgttctgcagtgttgaaacagaatggaaatgacaagaaatatctgcagttatccaggagaaagtataatggcaaaattattggtttctttctttactttgtgcttgtttttatccccttgggttgtttttctctgatttttaaataaacttaagaaatttagattacagagtatgcatgactgtaagaaaaagaaattgagaggaagtgatcatagcaaattaaagaagtcttttcctcccagaacttaaagtaaaataaaaaataaataaataaataaaatcttttccacag

SEQ ID NO: 1154 - DNA, 4439 bp, Homo sapiens
aggggcggggccggactcgagcggggcggggctcgcgccagcgcccccagctccgtggcggcttcgcccgcgagtccagaggcaggcgagcagctcggtcgcccccaccggccccatggcagcccccggcgccccagctgagtacggctacatccggaccgtcctgggccagcagatcctgggacaactggacagctccagcctggcgctgccctccgaggccaagctgaagctggcggggagcagcggccgcggcggccagacagtcaagagcctgcggatccaggagcaggtgcagcagaccctcgcccggaagggccgcagctccgtgggcaacggaaatcttcaccgaaccagcagtgttcctgagtatgtctacaacctacacttggttgaaaatgattttgttggaggccgttcccctgttcctaaaacctatgacatgctaaaggctggcacaactgccacttatgaaggtcgctggggaagaggaacagcacagtacagctcccagaagtccgtggaagaaaggtccttgaggcatcctctgaggagactggagatttctcctgacagcagcccggagagggctcactacacgcacagcgattaccagtacagccagagaagccaggctgggcacaccctgcaccaccaagaaagcaggcgggccgccctcctagtgccaccgagatatgctcgttccgagatcgtgggggtcagccgtgctggcaccacaagcaggcagcgccactttgacacataccacagacagtaccagcatggctctgttagcgacaccgtttttgacagcatccctgccaacccggccctgctcacgtaccccaggccagggaccagccgcagcatgggcaacctcttggagaaggagaactacctgacggcagggctcactgtcgggcaggtcaggccgctggtgcccctgcagcccgtcactcagaacagggcttccaggtcctcctggcatcagagctccttccacagcacccgcacgctgagggaagctgggcccagtgtcgccgtggattccagcgggaggagagcgcacttgactgtcggccaggcggccgcagggggaagtgggaatctgctcactgagagaagcactttcactgactcccagctggggaatgcagacatggagatgactctggagcgagcagtgagtatgctcgaggcagaccacatgctgccatccaggatttctgctgcagctactttcatacagcacgagtgcttccagaaatctgaagctcggaagagggttaaccagcttcgtggcatcctcaagcttctgcagctcctaaaagttcagaatgaagacgttcagcgagctgtgtgtggggccttgagaaacttagtatttgaagacaatgacaacaaattggaggtggctgaactaaatggggtacctcggctgctccaggtgctgaagcaaaccagagacttggagactaaaaaacaaataacagaccatacagtcaatttaagaagtaggaatggctggccgggcgcggtggctcacgcctgtaatcccagcactttgggaggccaaggcgggcggatcacgaggtcaggagttcgagaccagcctgaccaacatggtttgctgtggaatttgtcatctaatgacaaactcaagaatctcatgataacagaagcattgcttacgctgacggagaatatcatcatccccttttctgggtggcctgaaggagactacccaaaagcaaatggtttgctcgattttgacatattctacaacgtcactggatgcctaagaaacatgagttctgctggcgctgatgggagaaaagcgatgagaagatgtgacggactcattgactcactggtccattatgtcagaggaaccattgcagattaccagccagatgacaaggccacggagaattgtgtgtgcattcttcataacctctcctaccagctggaggcagagctcccagagaaatattcccagaatatctatattcaaaaccggaatatccagactgacaacaacaaaagtattggatgttttggcagtcgaagcaggaaagtaaaagagcaataccaggacgtgccgatgccggaggaaaagagcaaccccaagggcgtggagtggctgtggcattccattgttataaggatgtatctgtccttgatcgccaaaagtgtccgcaactacacacaagaagcatccttaggagctctgcagaacctcacggccggaagtggaccaatgccgacatcagtggctcagacagttgtccagaaggaaagtggcctgcagcacacccgaaagatgctgcatgttggtgacccaagtgtgaaaaagacagccatctcgctgctgaggaatctgtcccggaatctttctctgcagaatgaaattgccaaagaaactctccctgatttggtttccatcattcctgacacagtcccgagtactgaccttctcattgaaactacagcctctgcctgttacacattgaacaacataatccaaaacagttaccagaatgcacgcgaccttctaaacaccgggggcatccagaaaattatggccattagtgcaggcgatgcctatgcctccaacaaagcaagtaaagctgcttccgtccttctgtattctctgtgggcacacacggaactgcatcatgcctacaagaaggctcagtttaagaagacagattttgtcaacagccggactgccaaagcctaccactcccttaaagactgaggaaaatgacaaagtattctcggctgcaaaaatccccaaaggaaaacacctatttttctactacccagcccaagaaacctcaaaagcatgccttgtttctatccttctctatttccgtggtcccctgaatccagaaaacaaatagaacataattttatgagtcttccagaagacctttgcaagtttgccaccagtagataccggccacaggctcgacaaatagtggtctttgttattagggcttatggtacatggcttcctggaatcaaaatgtgaattcatgtggaagggacattaatccaataaataaggaaagaagctgttgcattactgggattttaaaagtttgatttacatttatattccttttctggttcccatgttttgtcactcatgtgcacattgcttcgccattgggcctccagtgtattgttctgcagtgttgaaacagaatggaaatgacaagaaatatctgcagttatccaggagaaagtataatggcaaaattattggtttctttctttactttgtgcttgtttttatccccttgggttgtttttctctgatttttaaataaacttaagaaatttagattacagagtatgcatgactgtaagaaaaagaaattgagaggaagtgatcatagcaaattaaagaagtcttttcctcccagaacttaaagtaaaataaaaaataaataaataaataaaatcttttccacagagaaaggcaactgtgatgataaaatttaacgttcccccaaacactgagtcaatgagatttttctcaggagatactttacctataacaacgccgttaaatccaaatctcttctaaacgatggcattctatgtaatgcctttcctggacttttttggccactgccctggactagtgaaagaatggactctatctttatctgcaagaggaactaaggccttctctcagactgcctggccagcctggggcactgaaaatacggctcatgttaatgagttacattatcagccagcccagccttgcccaccatttaagaaatatcacagagccactagatctcatatgatcttcttcaagccattattttaactcaagaaaactctagagaagaaaagtgaagaagtcatgttgaagaagatgtaagaatgtgtcaagaccatccagaaatgatatgagaaatactgatattttaaatggttgacatcatccagcgaaatgaatctacattaaatgttgttttaactgcgctatgattaaaaccattcatatagagttagtctttacaactactattctgttatttttttttttaatctgacaacatttgtcctaagtaagataagcaaaaaaattcttcaactccttttggcaagaaaactgtaacagaaaataaattttgaatgtgtacttaagtctttattatatttgaagcaattttttttcaattttaaaagctgaatgaagacaacttaggttgctaacctagttcaaaatgaaattatttagataccaatttttaaaatactggagagaatttatatgtctttttccagagttctgatgataagcatttggagtgcatttattcctccagataataaatgtgtgttcagaactttttgtgttttttaaggcattaataaagccttcgataatattaaatacaaaatgagaccaa

SEQ ID NO: 1155 - DNA, 4242 bp, Homo sapiens
gcggccgctgctgaggcggagactccccgccgccgcttcctccacccccagtccgccggcctcgcggcgctgagggcgggagcgcgcagagctcttccctcctcctttttcttcctcctcctcctcctcctccgggtccccgcccagcacccctcgcaccaggcggcggcggcggaggaggagagctagacccgccgccggggcacaacatggcggagccctcggccccggagagcaagcacaagtcgtccctcaactcgtccccgtggagtggcctcatggccctgggaaacagccggcacggccaccacgggcccggggcccagtgcgcgcacaaggcggcgggcggcgcggcgccgccgaagccggccccggcggggctgtccggggggctgtcgcagccggctgggtggcagtcgcttctctccttcaccatcctcttcctggcctggcttgccggcttcagctcgcgcctcttcgccgtcatccgcttcgaaagcatcatccacgagttcgacccgtggtttaactatagatcaacacatcatcttgcatctcatgggttctatgaatttttaaattggtttgatgaaagagcatggtatccactaggaagaatagtaggtggtactgtttacccagggttgatgataaccgctggccttattcattggattttaaatacattgaacataactgttcacataagagacgtatgtgtgttccttgcaccaacttttagcggccttacatctatatctactttcctgcttacaagagaactttggaaccaaggagcaggacttttagctgcttgttttattgctattgtaccaggctacatatctcggtcagtagctggatcctttgataatgaaggcattgctatttttgcacttcagttcacatactatttatgggtaaaatctgtaaaaactgggtcagttttttggacaatgtgctgctgcttatcctatttctatatggtctctgcttggggtggttatgtatttatcatcaatcttattccactgcatgtatttgtgttgttactgatgcagagatacagcaaaagagtctacatagcatatagcactttctacattgtgggtttaatattatcaatgcagataccttttgtgggattccagccaatcagaacaagtgaacacatggcagctgcaggtgtctttgcattgctgcaagcttatgctttcttgcagtatctgagagaccgattaacaaaacaagagttccagacccttttctttttgggtgtatcactagctgcaggtgctgtgttccttagtgtcatctatttgacttatacaggttacattgcaccatggagtggcaggttttattcattgtgggatactgggtatgcaaaaatacacattccaattattgcatcagtgtctgagcatcaacctacgacttgggtgtctttcttctttgatctacatattcttgtatgtaccttcccagcaggcctttggttctgcatcaaaaatatcaacgatgaaagagtatttgttgctctatatgcaatcagtgctgtctactttgctggagtgatggtgcgactgatgttgactttgactccagtcgtgtgtatgctgtctgcaattgccttttcaaatgtttttgagcactatttgggggatgacatgaaaagggaaaatccacctgtggaggacagcagtgatgaggatgacaaaagaaaccaaggaaatttgtatgataaggcaggtaaagtgaggaaacatgcaactgaacaggaaaaaactgaagagggattaggccctaatataaaaagcattgtcaccatgttgatgctgatgctattgatgatgtttgctgtccactgtacctgggtcacaagcaatgcctactctagtccaagtgtagtcctggcctcatacaatcatgatggcaccaggaatatcttagatgattttagagaagcttacttttggctaaggcaaaatacagatgaacatgcacgagtaatgtcttggtgggattatggctatcagatagctggaatggctaatagaactacgttggtggataataacacctggaataacagccacatagcactggtgggaaaagctatgtcttctaatgaaacagcagcctataaaatcatgaggactctagatgtagattatgttttggttatttttggaggggttattggctattctggtgatgatatcaacaaatttctctggatggttaggatagctgaaggagaacatcccaaagacattcgggaaagtgactattttaccccacagggagaattccgtgtagacaaagcaggatcccctactttgttgaattgccttatgtataaaatgtcatactacagatttggagaaatgcagctggattttcgtacacccccaggttttgaccgaacacgtaatgctgagattggaaataaggacattaaattcaaacatttggaagaagcctttacatcagaacactggcttgttaggatatataaagtaaaagcacctgataacagggagacattagatcacaaacctcgagtcaccaacattttcccaaaacagaagtatttgtcaaagaagactaccaaaaggaagcgtggctacattaaaaataagctggtttttaagaaaggcaagaaaatatctaagaagactgtttaaatgcactgttctggttcctaacttgaagcagttgtccttgtgagaaccggtctttgcctttagctcatgtcgtgtttcacagcaaagagggtacagaaccatcactggtccaggttaatgtacaaaattttctggcaatgcctgattaaaaaaataaaattggcttgttgagaacagctgttttcgatttctaatgtgaagcaagacagagcactgctgtaaatgtctagcagcagattttttttttattggtacatattatccttcaaatctgagaatttggactaactgcaccaaagaaccctctaatttggtccctggcacatgcatacttgtcaatgtttttattcttttacaagacctgcattttatttgaattacccgaatagcaatatgtaaaatacaagtgacaaaatgtgatgagagcttcttgaaccggtaaactagtacaggtctgagaaagacatattagaagaatcattatacttccttgaattatatttattttcatgtttctctaatgcaaagaatgtttcatcaaatgtatattttctgttgcttactgtttgctctgagaagaagctgctgtttcaaagatggacctctgagtagctaattgattcaagtagtttttttatgttgacacattattactgctgttagcagtcgttttcaccaggtacttacagagcagatttcatacatcattcattcaagggctaaatttatattttttggaaatcatggcaactacacaggatgttgcttaccaggacggagttttggtatcttagtactgaagttagcactatgtttacatgcaaaagattaaggaaaaaacccttaaagtggacaggtatccaaagttcattttctgtgactcatcaaagtgacaaaagacttgtaacaactttgcctggacttttttcattttacaacagttcatccattcacaatgattttgttctctgctccatattttttaatcccttaagcatttgatgaaacactctttagtgctatatgcattttcttacttttgttaaaaatgtgacaattgtcaaaaaatgcactaaaatgtaaatggagattgaacaagttcactttccagcttataggcaactttatacagacttgaacattttctccagttgtttagtaaaagtgaaagagaaagggtttttcctgccacaggatataacttttttttatataacaagcataacacaccactgcttttggtggaaaagtgcagaatagtatgtaccttttatgaagaaaaatgtaatttacaatattcagtgagaatgttactgctgattttcttttccaaggtgtagaatattctttgatttatagaattcatttttgacccagatgatggttcctttacagaacaataaaatggctgaacattttcacaaatagagtgtaacgaagtctggatttctgataccttgtcatttgggggattttattttactttgttgctttaaaattcaatgcagagaagttgttgactgtaggggaaataaagttaattcaaattttg

SEQ ID NO: 1156 - DNA, 100000 bp, Homo sapiens
gagcagtcgtgcattcccagcctcgcctcgggtgtagggattgcatagaaaagcaaaactacacagtcttgactgtgtagttttgtttttaggattagaggctcaccgattcatgtcggagatggtcagaaaaaccaactctccataggacgtcgtttcagaagcaaccttgggcttagtcccaccctttttaggcactcttgagaaatcagtgcctagaaagatgacaactcaagcaccgacgtttacgcagccgttacaaagcgttgtggtactggagggtagtaccgcaacctttgaggctcacattagtggttttccagttcctgaggtgagctggtttagggatggccaggtgatttccacttccactctgcccggcgtgcagatctcctttagcgatggccgcgctaaactgacgatccccgccgtgactaaagccaacagtggacgatattccctgaaagccaccaatggatctggacaagcgactagtactgctgagcttctcgtgaaagctgagacagcaccacccaacttcgttcaacgactgcagagcatgaccgtgagacaaggaagccaagtgagactccaagtgagagtgactggaatccctacacctgtggtgaagttctaccgggatggagccgaaatccagagctcccttgatttccaaatttcacaagaaggcgacctctacagcttactgattgcagaagcataccctgaggactcagggacctattcagtaaatgccaccaatagcgttggaagagctacttcgactgctgaattactggttcaaggtgaagaagaagtacctgctaaaaagacaaagacaattgtttcgactgctcagatctcagaatcaagacaaacccgaattgaaaagaagattgaagcccactttgatgccagatcaattgcaacagttgagatggtcatagatggtgccgctgggcaacagctgccacataaaacacctcccaggattcctccgaagccaaagtcaagatccccaacaccaccgtctattgctgccaaagcacagctggctcggcagcagtccccatcgcccataagacactccccttccccggtcagacacgtgcgggcaccgaccccatctccggtcaggtccgtgtctccagcagcaagaatctccacatcccccatcaggtctgttaggtctccattgctcatgcgtaagactcaggcatccaccgtggccacaggtcctgaagtgcctcccccttggaagcaagagggctacgtggcctcctcatctgaggctgagatgagagagacaacgctgacaacctctactcagatcaggacagaagagagatgggaagggagatacggtgtccaggagcaagtgaccatcagtggtgctgcgggtgctgccgccagtgtgtcggccagtgctagctacgcagcagaggctgttgccactggtgctaaagaggtgaaacaagatgctgacaaaagtgcagctgttgcgactgttgttgctgccgttgatatggccagagtgagagaaccagtgatcagcgctgtagagcagactgctcagaggacaaccacgactgctgtgcacatccaacctgctcaagaacaggtaagaaaggaagcggagaagactgctgtaactaaggtagtagtggccgccgataaagccaaggaacaagaattaaaatcaagaaccaaagaagtaattaccacaaagcaagagcagatgcacgtaactcatgagcagataagaaaagaaactgaaaaaacatttgtaccaaaggtagtaatttccgcagctaaagccaaagaacaagaaactagaatttctgaagaaattactaagaaacagaaacaagtaactcaagaagcaataagacaggaaactgagataactgctgcatccatggtggtagttgccactgcaaagtccacaaaactagaaacagtcccgggagctcaagaagaaactaccacacaacaagatcaaatgcacctaagttatgaaaagataatgaaggaaactaggaaaacagttgtacctaaagtcatagttgccacacccaaagtcaaagaacaagatttagtatcaagaggtagagaaggcattactaccaaaagagaacaagtgcaaataactcaggagaagatgagaaaggaagccgagaaaactgccttgtctacaatagcagttgctactgctaaagccaaagaacaagaaacaatactgagaactagagaaactatggctactagacaagaacaaatccaagttacccatggaaaggtggacgttggaaaaaaggctgaagctgtagcaacagttgttgctgcagtagaccaggcccgagtcagagagcccagagagcctgggcatcttgaagaatcctatgctcagcagaccactttggagtacggatataaggaacgcatttccgccgcaaaggtagctgagcctccccaacgtccagcctcagaaccccacgttgtccctaaagcagtcaagcctagagtaatccaggctccttctgagactcatatcaaaactactgatcaaaagggaatgcacatatcatcacagatcaagaaaactacagatctaacaacggaaagattagtccatgtggataaacgcccccgcacagctagccctcactttactgtttcaaaaatttctgttcctaagacagaacatggatatgaggcatcaatagccggtagtgctattgccacattacaaaaagagttgtcagccacatcttctgctcagaagatcaccaaatcggtgaaggctcctactgtgaagcccagtgagactagagtaagggcagagcccacacccttgccacagttccccttcgctgacacaccagatacttacaagagtgaagctggcgttgaggtgaaaaaggaagtaggggtgagcatcactggcaccaccgtccgtgaagagcgctttgaagtactgcacggacgcgaagccaaggtaacagaaacagcaagagtaccagcacctgttgaaattcctgttactccaccaactttggtctcgggcttaaaaaatgtgactgtcatagaaggtgaatctgtcaccttggagtgccacatctctggatacccatccccgacagtgacatggtacagggaagactaccaaatcgaaagttccattgacttccagataaccttccagagtggaattgctcgtcttatgattcgcgaagcatttgcggaagacagcgggcgatttacttgcagtgctgtaaatgaggctggaaccgtcagcacatcctgctatctggctgtgcaggtgtcagaagaatttgaaaaggaaaccacagccgtgactgagaaatttactacagaagagaaacgctttgttgagtcaagagatgtggttatgactgatactagcctcacagaggaacaagcagggcctggagaacctgccgcgccttactttattacaaaaccagtggtccagaaactggtggaaggtgggagcgtggtgtttggatgccaagttggcggcaacccaaagccccatgtatactggaaaaaatctggtgttcctctaaccactggatacagatacaaagtgagttacaacaaacaaaccggtgaatgcaagctggtgatttctatgacttttgctgatgatgctggagaatacactattgttgttcgcaataagcatggagaaacttctgcatctgcttccttgcttgaagaagctgattatgagttactgatgaagtcccagcaagaaatgctttatcagacacaagtgactgcatttgttcaagaacctaaagttggagaaacagcacctggatttgtatactctgagtatgaaaaagagtatgaaaaagaacaagccttaattaggaagaaaatggccaaagatactgtagtggtcagaacttatgtagaagatcaggaattccatatttcttcctttgaagagagacttattaaagaaattgaatatagaataataaagactacattagaagaacttcttgaagaagatggagaagaaaagatggcagttgacatttctgaatctgaagctgttgaatcaggatttgatttaagaatcaagaattatagaattcttgaggggatgggtgtcacttttcattgcaagatgtctggatatccattaccaaagattgcttggtacaaagatggcaagcgcatcaaacatggagaaagataccaaatggactttctacaagatggcagagctagtctgcgtatacctgttgttcttccagaagatgaaggaatctacactgcatttgccagcaatattaaaggaaatgcaatttgctcagggaaattgtatgtggagcctgctgcaccacttggagctccgacttacattcccacactagagccagtgagcagaatcagatctctctctccacgttcagtgagcaggtctcctatacgcatgtctcctgcacggatgtcacctgcaaggatgtctcctgcacggatgtcccctgcaagaatgtcccctggacgtaggctggaggagacagatgagtcacaacttgagagactatataaaccagtctttgtgttaaaacctgtttctttcaaatgtttagaagggcaaactgccagatttgacttaaaggttgttggtagacctatgccagagacgttctggtttcatgatggccagcaaattgtcaatgactatacccataaagtagtcattaaagaagatggtactcaatcactaattattgtccctgccacacccagtgattctggggaatggactgtggttgcccaaaacagggcaggcagatcttcaatttcagtgattttaactgtggaagctgtggaacatcaggtaaaaccgatgtttgtagaaaaactgaaaaatgtcaatataaaggaaggttcccgacttgaaatgaaagtcagagctacgggtaaccccaaccctgacattgtatggttgaaaaacagtgacatcattgtgcctcataaatatcccaaaatcagaattgaaggaaccaagggagaagctgcccttaaaatcgattccactgtcagccaagattctgcctggtatactgcgactgctattaataaagctggcagagacactacaagatgcaaagtaaatgttgaagttgagtttgcagagcctgagccagagagaaagttaatcatcccacgggggacatatagagcaaaggagattgcagccccagaactggagcccctccatttgcgatatggccaagagcaatgggaagaaggtgatctctatgacaaagagaaacaacagaaaccatttttcaagaaaaaactcacttccttaagacttaagcgctttgggcctgcccactttgaatgcaggctaacacccattggtgacccaacgatggtggtggagtggctccatgatggaaagccacttgaagcagccaacaggctccgtatgatcaatgaatttgggtactgcagccttgattatggcgttgcatattctagagacagtggtatcattacttgcagagccactaacaaatatggaacagatcacacatctgctacccttattgttaaagatgagaaaagtcttgtggaagaatcccaattgcctgaggggaggaaaggcttacagagaattgaagaattagagagaatggctcatgaaggtgcacttacaggtgtaacaacagatcagaaagaaaagcaaaagccagacattgtcttgtacccagagccagttagagtacttgaaggggagactgcaaggttccgctgcagggtaacaggctaccctcagcccaaagtcaactggtacctcaatggacagctcatccgcaaaagcaaaaggttcagagttcgctatgatggtatccattacctggacatcgtggactgcaaatcatatgacacaggtgaagtgaaggtcaccgcggaaaatcctgaaggtgtgatagagcataaagtgaagcttgagattcaacagagggaagattttaggtctgtccttaggagagctcctgaaccaaggcctgagtttcacgtacatgaaccaggaaagcttcagtttgaagtacaaaaagtggatagacctgttgacaccactgaaaccaaagaagttgtgaagttgaaaagggctgaaagaattacccatgaaaaagtgcctgaagagtcggaagagctgcgcagtaaattcaagcgcagaacagaagagggctattatgaagccattaccgctgtggagctcaagtctcgaaagaaggatgaatcctatgaggaactcctcaggaagacaaaagatgaacttctccactggaccaaagagttaactgaagaggaaaagaaagctcttgccgaagaaggcaaaatcacgattccaacttttaaacctgacaagattgaactaagtcctagtatggaggctccaaaaatcttcgaaagaatccagagccaaacagtgggccaaggatctgatgcacacttccgggtcagagtcgtggggaaaccagaccccgaatgtgaatggtacaaaaatggtgtcaaaattgaacggtctgaccggatctactggtactggcccgaagacaatgtttgtgaattggtcataagagatgtgactgctgaggactctgccagcatcatggtaaaagccatcaacatagctggagaaacctccagtcacgcattcttacttgtccaagccaagcaattgatcactttcacacaggaattacaagatgttgttgctaaggaaaaagacactatggcaacctttgaatgtgaaacttcagaaccatttgtcaaagtgaaatggtataaagatggtatggaggttcatgagggagataaatacaggatgcactctgacagaaaggttcacttcctctccatactgaccattgatacgtctgatgctgaagattacagctgtgtacttgtggaagatgaaaatgtcaaaacgactgctaaacttattgttgaaggtgcagttgttgagtttgtgaaagaacttcaggacatagaagttccagaatcatattcaggagaattagagtgcattgtatccccagaaaatatagaaggaaaatggtatcataatgatgtggagcttaaatccaatggcaaatatacaattacatctcgtcgtggacgtcagaacctcacggtcaaggatgtaaccaaggaggaccagggagaatacagctttgtcatcgacgggaaaaagacaacctgtaaattaaagatgaaaccccgccccattgctatcctacaaggacttagtgaccaaaaagtctgtgagggtgacattgttcagcttgaagttaaagtctccttggaaagtgtggaaggcgtctggatgaaagacggccaagaagtgcagcccagtgacagggttcacattgtgatagacaaacaatctcatatgctgctcattgaagacatgactaaggaagatgctggaaattactctttcaccattccagcccttggcctctccaccagtgggcgtgtctctgtctatagtgtggacgtgataacacctctaaaagatgttaatgtgattgaaggcaccaaggctgtgcttgaatgtaaggtgtcagtccctgatgtgacttctgttaagtggtacttaaatgatgaacaaatcaagcctgatgaccgtgtacaggccattgtgaaaggtactaaacagcgactagtcattaaccgaactcatgcttcagacgaaggaccttacaagctgatagttggcagagttgaaaccaactgtaatctctctgtagaaaaaattaaaattatcagaggtcttcgtgaccttacctgtacagaaactcaaaatgtggtgtttgaggttgagctgtcccactctggaattgatgtcctgtggaattttaaggacaaggaaatcaagcccagttctaaatataaaattgaagcacatggaaaaatatataaattgacagttctaaatatgatgaaagatgatgaaggaaaatacacattttacgcgggagaaaatatgacatctggaaaacttactgtggcaggtggggccatctccaagccactcacagatcagaccgtagctgaatcccaggaagctgtgtttgaatgtgaagttgccaacccagattccaaaggcgaatggttgagggatggcaaacacctaccactgactaacaacatcagaagtgagtctgatggccacaaaaggagacttatcattgctgccaccaaattagatgacattggagaatatacctacaaggtggccacctccaaaacatctgccaaactcaaagttgaagctgtcaaaattaagaagactctgaagaacctcacagtgacagaaacacaggatgctgttttcactgtcgagcttacacaccctaatgtcaaaggtgtccagtggatcaaaaatggagttgtgctggaatccaatgaaaagtatgctatctctgtcaaaggaacaatttactctctgaggattaaaaactgtgccatcgtggatgagtctgtttatggcttcaggcttggaaggcttggagccagtgccagactgcacgtggagactgtcaagatcattaaaaagccaaaggatgtgacagccttggaaaatgccactgttgcctttgaagttagtgtttcccatgacactgttccagtaaaatggttccataagagtgtggaaattaagccaagtgacaaacacagactggtctcagaaaggaaagtccacaagctgatgctgcagaacatctccccctcagatgctggggaatacacagctgtggtcgggcaattggaatgcaaagcaaaactgtttgtggagacattacatattacaaaaaccatgaaaaatatcgaggtgcctgagaccaaaactgcctcttttgagtgtgaggtgtcccacttcaatgtcccttccatgtggctgaagaatggtgtggaaattgagatgagtgaaaagttcaagatagttgtgcagggaaaactccatcagctgatcatcatgaacaccagcacagaggactcggcagaatacacatttgtctgtggcaatgaccaagtcagtgccaccctgacagtcaccccaatcatgattacttccatgctgaaagacatcaacgctgaagaaaaagacactattacttttgaggtgacagtgaactatgaaggcatctcttacaaatggttaaagaatggtgtggaaatcaaatcaactgacaagtgccagatgagaaccaaaaagctcacacactcactgaacatcaggaatgttcactttggggatgctgctgactacacctttgtggctggaaaagcaacatcaacagccacactttatgtggaagctcgtcatatagaatttaggaaacacattaaggacattaaggtactggagaagaagcgagccatgtttgaatgtgaagtttctgaacctgacatcactgtacagtggatgaaagatgaccaggaactgcagatcacagacagaataaagattcagaaggagaaatatgtccaccgccttctgatcccatccacccggatgtctgatgctgggaagtacacagtggtggcaggaggcaacgtgtcaactgcaaaactctttgtagaaggcagagatgttcgcatccgaagtattaaaaaggaggttcaggtcattgagaaacagcgtgctgttgttgaatttgaggtcaatgaagacgatgttgatgcccactggtataaagatggcattgaaatcaatttccaagttcaagaacgacacaaatatgtagtggaaagaagaatccaccgaatgtttatctctgagaccagacagagcgatgcaggagaatacacctttgtggcaggaaggaacaggagttctgtcactctctatgtcaatgctcctgaaccgccccaagttctgcaggagctccagcctgtcactgtgcagtctggcaagcctgcccgcttctgtgccatgatatccggaagaccacagcccaaaatttcctggtacaaggaagagcagctgctttccactggcttcaagtgcaaatttcttcatgatgggcaagagtacacgcttttgctaattgaagccttcccagaggatgcggcagtctatacctgtgaagccaagaatgactatggtgttgccacaacatcagcttcactctcagtggaagttccagaagttgtgtctcctgatcaggaaatgcctgtttatccacctgccatcatcaccccgcttcaggacactgtcacttctgaagggcagccagcccgttttcaatgccgggtttctggaacagatctaaaagtgtcgtggtacagcaaagacaagaaaatcaagccatctcggttctttagaatgactcaatttgaagacacttatcaactggaaattgccgaagcttatccagaagatgaaggaacttacacgtttgttgctaataatgctgtaggccaagtatcaagcacagccaacctgagtctggaagctcctgaatcaattttgcatgagaggattgaacaagagattgagatggaaatgaaagagttttctagttcttttctgtctgccgaggaagaaggacttcatagcgccgaacttcaattatctaaaataaatgaaacacttgaacttttgtctgaatctccagtttacccaactaaatttgattccgaaaaggaaggcactggcccaattttcatcaaagaagtgtcaaatgctgatataagcatgggggatgtggctacactgtctgtaactgtcattggcatccccaaacctaaaattcagtggttctttaatggagtgctattaaccccttctgctgactacaaatttgtttttgacggtgatgatcatagcctgatcattctgttcaccaaattggaggatgagggagagtatacatgtatggccagtaatgactatggaaagacaatatgtagtgcctatctaaaaattaattccaaaggagagggtcacaaagacactgaaacagaatcagcagtggcaaaatctctggaaaagctgggaggtccttgtcctcctcacttccttaaggagttaaaaccaattcgctgtgctcaagggcttcctgccatctttgagtacacagtggttggagagcctgcccctactgttacatggttcaaagaaaacaagcagctttgcaccagtgtttattacactatcattcataaccctaatggctctggaactttcattgtcaatgaccctcagagggaagacagtggcctctatatctgtaaagcagagaatatgttgggtgagtccacctgtgcagcagagctgcttgtgcttctggaagacacagacatgactgataccccctgcaaagcaaagtccacaccagaggctcctgaggattttccacagacacccttaaagggtcccgcagttgaagcacttgactcagagcaggaaattgcaacgtttgtaaaagacaccattttgaaagctgctttaattacagaagaaaaccagcaactatcttatgagcatattgctaaagccaatgaattgagcagtcagcttcctttgggagctcaggaattgcaatccattttggagcaagacaagctcactcctgaaagcaccagggaatttctttgcatcaatggcagtattcactttcagcctctcaaggaaccatctcccaacctacagctgcagattgtacagtcccagaaaaccttctccaaagaaggtattctaatgcctgaagagcctgagacacaggcagttctatcagataccgagaaaatcttcccaagtgccatgtccatagaacaaattaattcattaacagttgagcctctgaaaactttattagctgaacctgaagggaattatccacagtcttcaatagaacctccaatgcattcttatctaacctctgtggctgaggaagtactttcaccaaaagaaaagacagtatctgacaccaacagagagcaaagagtgactcttcaaaagcaagaggcacaaagtgcgctcatcttgagtcagagcttagctgagggacacgtggagagtctccagagtcctgatgtcatgatctctcaggtaaactatgagcccctagtcccttcagaacactcatgcacagaaggaggtaaaattttgatagaaagtgcaaatccactggaaaatgcagggcaagattctgcggtcagaattgaggaaggcaagtccttaagatttccactagcacttgaagaaaagcaggtactgctcaaagaagagcattctgacaacgtggtgatgcccccagaccaaatcattgagtctaaaagagagcccgtggcaataaagaaagtgcaggaggtacagggaagggaccttctttctaaggaaagcttgctttctggtattccagaagagcagagattaaacctgaaaattcaaatctgccgggctttgcaagcagccgtggccagcgagcagccaggtcttttctctgagtggctaagaaatattgaaaaggtggaggtcgaggctgtaaacatcacccaagagcccagacacatcatgtgcatgtaccttgttacttcggcaaagtctgtaacagaagaagtaaccatcattattgaagatgttgatcctcaaatggctaacctgaaaatggaacttagggatgctttgtgtgctattatatatgaggaaatagacatcctaacagctgagggtcctagaattcagcaaggagccaaaacaagtttgcaagaagaaatggattctttttcaggttcacagaaggttgaacccattactgaaccagaagttgaatctaaatatctgatctcaactgaagaggtcagttattttaacgtgcaaagtagggttaaatatttggatgccacacctgtcactaaaggggttgcttcagctgttgtctctgacgaaaaacaagatgagagtctgaaaccatcagaggaaaaagaggagtcttcctctgaaagtggtactgaggaggttgctacagtaaagatacaggaagctgagggtggcttaatcaaagaggatggccccatgatacatacacctttagtggacactgtttctgaggaaggtgatattgtacacctcacaacatccataacaaatgctaaagaggtgaattggtattttgagaataaactggtgccttcagatgaaaagttcaagtgtttacaagatcaaaatacatatacgctagtcatcgacaaagtaaataccgaagaccatcaaggagagtatgtctgtgaggccttgaatgacagcggaaaaacagcaacttcagccaaactcactgtagtaaaaagagctgccccagtgatcaagaggaaaatcgaacccctggaagtagcactgggccacctagccaaattcacctgtgagatccaaagtgctcccaatgtccggttccagtggtttaaagctggccgagaaatttatgagagtgacaagtgttctattcgatcttcaaagtatatctccagccttgaaatcctgagaacccaggtggttgactgcggcgagtatacatgcaaagcttccaatgagtatggcagtgtcagctgtacagccacactaactgtgacagaggcatatccaccaacctttctctccagacctaagtcccttacaacttttgtgggtaaggcagccaagttcatctgcacagtgacagggactcctgtgatagaaaccatttggcagaaagatggtgctgcactctcaccttcacctaactggaggatttccgacgcagaaaacaaacacattttagaactctcaaaccttaccattcaagatagaggagtttattcttgtaaggcttctaacaagtttggagcagacatctgccaagcagagttgatcatcattgataagccacatttcattaaagaattagagcctgtgcagtccgctatcaataagaaggtccaccttgagtgccaagtagatgaagacagaaaagtcacagttacgtggagcaaagatgggcaaaaactccccccagggaaagattataagatctgttttgaagataaaatagcaacacttgagattcctttggccaaactgaaagattcaggaacctatgtctgtacagcttcaaatgaggctggaagcagctcctgctcagccacagtcactgtcagagagccaccatccttcgtgaagaaggtggatccctcttatttaatgctcccaggtgaatcagcacgcctccattgcaagctgaaaggctcacctgtgatccaggttacttggtttaaaaataacaaagaactcagtgaaagtaacacagtccgaatgtattttgtcaattctgaggctatacttgatattacggatgtaaaagttgaagacagtgggagttactcatgtgaagcagtgaatgacgtcggcagtgatagctgcagtactgaaatagttatcaaagaacctccttctttcatcaaaactcttgagcctgcagacatagtgagaggaacaaatgctctacttcagtgtgaagtctcaggcactggaccatttgaaattagctggttcaaagacaagaaacaaattcgaagtagtaaaaaatacagattgttttctcagaagtctcttgtgtgtctggagatcttttcgtttaatagtgcagatgttggtgaatatgaatgtgttgttgctaatgaagtcggcaagtgtggctgcatggcaacccacttactcaaagaacctccaacctttgtaaagaaagtagatgatttgattgcactaggaggacaaaccgttaccctgcaagctgctgtgagagggtcagagcccatttctgtcacatggatgaaaggtcaagaggtcatcagagaagacggaaaaatcaaaatgagcttttccaatggtgttgcagtcttgataatccctgatgttcagattagttttggaggcaaatacacgtgcctggctgaaaatgaagctggaagccaaacatctgttggggaattaatagttaaagaacctgccaaaatcattgagcgagcagaactgatccaggtgacagcaggagatcccgccacactggagtacacagtggcaggcacgccagaactgaagcccaaatggtacaaagatgggagacccttggtcgccagtaaaaaataccgaataagttttaaaaacaatgttgcccagctcaaattttattcagctgagctgcacgacagtggccaatacacatttgagatttccaatgaagtgggcagcagctcctgtgagactacattcactgtattagatcgagacattgctccattttttaccaaacccttgcgcaacgtggatagtgttgttaatggtacctgcagactggactgcaaaattgcaggctccctccccatgagggtgtcctggtttaaggatggcaaagaaatagctgcttctgacagatacaggatagcatttgtggaaggcacagcctctttggagatcatcagagtagacatgaatgatgcagggaatttcacttgtcgagccacaaattccgtgggaagcaaagacagcagtggagccctgattgtgcaagaaccacccagttttgtaactaaacccggctcaaaggatgttctgcctggctcagcagtctgcctgaagagcactttccaaggatctactcctctcacaatcagatggtttaagggcaacaaagagctggtttctggtggaagctgctatattaccaaagaagctttagagagttccctggaactctatttagtaaaaacctctgattcgggcacgtacacatgtaaagtcagcaatgtcgctggaggggtggaatgcagtgcaaacttgtttgtaaaagaacctgccacatttgttgaaaagttagagccatcacagctgttaaagaagggagatgccacccagctagcctgcaaagtaactggtacccctccaattaaaataacatggtttgcaaatgatagagaaattaaggagagcagcaaacacagaatgtcttttgtggagtctactgcagttctaagactgacagatgttggcatcgaagacagtggtgaatatatgtgtgaggcccaaaatgaggctggcagtgaccactgcagtagcattgtaatagtcaaagagtcaccttattttaccaaggaatttaagccaattgaagtcttaaaggagtacgatgtcatgttgctggctgaggtggcaggcactcctccctttgagatcacttggttcaaagataacacaatcctgcgaagtggtagaaagtataagactttcattcaggatcatctggttagcctgcagatcctcaagtttgtagctgcagatgctggcgaataccagtgtcgggtgaccaatgaggtgggcagcagcatctgcagtgccagggtgactttaagagaacccccatccttcataaagaagatcgagagtaccagctccctccggggaggcacagctgccttccaggccactctgaagggctccttgccaattacggtgacttggctaaaagacagcgatgaaatcactgaagacgataatataagaatgacctttgagaacaatgtggccagtttgtacctcagtggcattgaagtcaagcatgatgggaaatatgtctgtcaggccaaaaatgatgcaggaatacaaagatgttctgcattactctcagtaaaagaacctgcaacaatcaccgaggaagctgtgtctatagatgtcacccaaggagacccagccactttgcaggttaaattttcagggactaaggagattacagccaaatggtttaaagatggccaagaactgaccctgggctcaaaatataaaatcagtgtcactgatacagtctcaatactgaagattatttctacagaaaagaaagatagtggagaatatactttcgaggtccaaaatgatgttgggaggagcagctgcaaggctagaattaatgtattagatcttatcatacctccttcattcaccaaaaagctgaagaaaatggacagcattaaaggttctttcattgatttagaatgtatagtggctgggtcacatcccataagcatccagtggttcaaagatgaccaagaaatatcagctagtgaaaagtacaaattctcttttcatgacaatactgccttcttggaaatcagccagctggaaggtacagacagtgggacatacacttgttctgccacaaataaggcagggcacaaccaatgcagtgggcatctgacagtcaaagaacccccttactttgtggaaaagccacagtcacaagatgtcaatcccaacacaagggtacagttaaaggctcttgtgggtggcactgcacccatgacaataaagtggtttaaagataacaaagagttacactcaggagcagcccgctcagtttggaaggatgacacctctaccagtctagagctctttgcagccaaagctaccgattctggaacctacatttgccaactaagcaatgatgttggcacagcaaccagcaaagccactctctttgtaaaagaacctcctcaattcattaagaagcccagtccagtcttagtgctgaggaatggacagtcaacaacatttgaatgccaaataacaggcactcctaaaatccgagtgtcttggtatctagacgggaatgaaataacagccattcagaaacatggcatttccttcattgatggtttagccactttccagatttctggtgccagggtagaaaatagtgggacttatgtgtgtgaagctcgaaatgacgcaggcacggcgagctgcagcattgaactcaaagtgaaagaaccccccacctttatcagagagctgaagcctgtggaggtagtaaaatatagtgacgtggagctggagtgtgaagttacgggaacacctccgtttgaagtcacttggctgaagaataacagggaaattcgaagcagcaaaaaatacacattgaccgacagagtgtctgtgtttaacctccatataaccaagtgtgacccttcagacactggggaataccagtgcattgtatccaatgaaggcggcagctgctcatgcagtactagagttgccctgaaagaaccaccatcattcattaagaagatagaaaataccactactgttttgaaaagttctgccacctttcagagtaccgtggcaggttctcctcctatttctataacctggctaaaggatgatcagattcttgatgaagatgataatgtctatatttcatttgtggacagtgtggccacacttcaaatcagaagtgtggataatggacacagtgggagatatacctgtcaagccaagaatgagtcaggagttgagaggtgttatgctttccttttagtacaagaaccagctcaaatcgtagagaaagctaaatcagttgatgttacggagaaagatcccatgaccttggaatgtgttgtggctggaacaccagaactcaaagtgaaatggcttaaagacgggaaacaaatagttcccagtagatacttttcaatgagttttgaaaataacgtggccagttttagaattcagtcagtaatgaagcaggacagcggtcagtacactttcaaggtggaaaatgacttcggaagcagtagctgtgatgcctacttaagagtgctagatcaaaatattcctccatcattcaccaaaaaattaaccaaaatggataaagttctgggctcttctattcatatggagtgcaaggtgtctggttcacttcccattagtgctcagtggtttaaggatggaaaagaaatatctacaagtgcaaaatacagacttgtgtgccatgagagatctgtgtctctggaagttaataatctggaattagaagatactgcaaattacacatgcaaagtgtcaaatgtagcaggagatgatgcatgcagtggcatcttaactgtgaaagaaccaccaagcttcctagtgaaacctgggcgacagcaagccatacctgattctacagtggaatttaaggcaatactaaaaggaacaccaccatttaaaataaaatggtttaaggatgatgtggaacttgtctcaggtcctaaatgtttcattggcttggaagggtcgactagcttcttaaatctctactcagtggatgcttctaagactggacagtatacttgccatgttaccaatgatgttggtagcgactcttgtactacgatgttgcttgtgacagaaccaccaaagtttgtaaagaaattagaagcctccaaaattgtgaaagcaggtgactcttcacgacttgaatgcaagatagctggatccccagaaatcagagttgtgtggttccgaaatgaacatgaacttccagccagtgataagtacagaatgactttcattgactcagtggccgtcatacagatgaacaatctcagtactgaggacagtggagatttcatttgtgaggctcagaatcccgctggcagcacaagctgcagtaccaaggttatagtaaaagagccacctgtttttagcagcttccctcctatagtagaaacccttaaaaatgctgaagtcagtcttgaatgtgaactttcgggaacaccaccgtttgaggtggtatggtacaaagacaagcggcaactcagaagcagcaagaaatacaagattgcatccaaaaacttccacacaagtattcacattctcaatgtggacacttcagacatcggtgaataccactgcaaagcacagaatgaagtgggaagtgatacttgtgtttgtactgtaaaattgaaagaaccaccaagatttgtctccaaactgaacagcctcactgttgtagccggagagcctgctgaattacaagcatccatagaaggcgcccagcctatttttgtccagtggcttaaagagaaggaagaagtgattagagaaagtgaaaacatcaggattacatttgtggaaaatgttgcaactctacagtttgcaaaagcagagccagctaatgctggaaagtatatctgccaaatcaagaatgatggtggaatgagggagaacatggccacactgatggtcttagagcccgcagtcattgttgagaaggcaggaccgatgacggtgactgtaggagaaacgtgcactctggagtgtaaggtggctggcactccggaactctctgttgaatggtacaaggatggaaagctgttgaccagcagccaaaaacacaaatttagcttctacaacaaaatctcttccttaaggattctctcagttgaaaggcaagatgcaggcacatacactttccaggttcaaaataatgttgggaaaagcagctgcacagctgtggttgatgtttcagaccgagcagttcctccctctttcacacgaagactgaaaaatactggtggggtgttaggtgcttcttgcatcttggaatgcaaagtagctggatcatcacctatttcagttgcctggtttcatgagaaaaccaagattgtcagtggagcaaagtaccaaaccacattttcagataatgtctgcacattgcagttgaattctctggattcctcagatatgggcaattacacatgcgtggctgctaatgtcgctgggtctgatgaatgtcgtgcagtgctaactgtacaagaaccaccctcttttgtgaaagaacctgaacctttggaagtactaccaggcaaaaatgtaaccttcacaagcgttattagaggaacccctccattcaaagtcaactggttcagaggtgccagagaactagtgaaaggagaccggtgcaacatctattttgaagacactgtggcagaactggaattatttaatattgacatatctcagagtggggaatacacctgtgtggtttctaacaacgctggccaagcatcttgcactacccgtctctttgtgaaagaaccagctgcatttttgaagagattaagtgatcattctgtagaaccagggaagtccataattctggagagcacctacactggaacacttccaatttctgtcacttggaaaaaggatggttttaacataactacctctgaaaaatgtaacatagtcacaacagagaaaacttgtatcctggaaattctgaatagcacaaaaagagatgcagggcagtattcctgcgagattgaaaatgaggcaggaagggatgtttgtggagctctggtatctacattagaaccgccttattttgttacggaactggaacctctggaggcagcagttggagattcggtttctttacaatgccaagttgctgggacaccagaaattacagtgtcttggtacaaaggagataccaaattacggccaactcctgaatacaggacctactttacaaacaatgtggccacacttgtttttaataaagtgaacatcaatgacagtggagagtacacatgcaaagcagaaaatagtataggaactgcttcttctaagactgtgttcagaattcaagagcgccaactcccaccttcttttgcaagacaattaaaggacattgaacaaactgtggggttacctgttacactcacttgtcgattaaatggctctgcacccatccaagtgtgctggtatagagatggagtacttttaagagacgatgaaaatctacagacttcatttgtagataatgtggcaactttaaaaattttgcaaactgacttgagtcactctggccagtactcttgctcagcttccaacccacttggaacagcatcttctagtgctagactcacagcaagagaacccaagaaatctcccttctttgacatcaagcctgtatctatagatgttattgctggagaaagtgctgattttgagtgtcatgttactggtgctcaaccgatgcgaatcacttggtcaaaagataacaaggagatccgtcctggaggaaactatacaatcacatgtgtgggaaacactcctcatttgagaattcttaaagtaggcaaaggagactctggtcaatatacttgccaagcaaccaatgatgttggcaaagacatgtgctcagctcagctcagtgtaaaagaacctccaaagtttgttaagaaattagaagcttcaaaagttgcaaagcagggagaatccattcaactggaatgtaaaataagtggctccccagaaatcaaagtttcatggttccgaaatgacagcgaacttcatgaaagttggaaatacaacatgtcattcattaattctgtggcattgcttacgatcaatgaagctagtgctgaagacagcggggactacatttgtgaggctcataatggtgttggtgacgccagctgcagcacagcgttgacagtgaaagcacctcctgttttcacccagaagccttctccagtaggagctcttaaaggttctgatgtgattctccaatgtgaaatttcgggaactcccccatttgaagtagtatgggttaaagatcgaaagcaagttagaaacagcaagaaatttaaaatcacttcaaaacattttgatacaagtcttcatatccttaatcttgaagcctccgatgtcggggaatatcactgcaaagctactaatgaggtgggaagtgacacgtgttcttgctctgtcaagttcaaagaacctccacgattcgtgaaaaagctaagtgacacctcaacccttattggggatgctgttgagttacgggccatagtggagggcttccagccaatttctgttgtctggctgaaagatagaggtgaagtcatcagagagagtgaaaataccaggatttcattcattgataacattgcaaccctccagctggggagtccagaagcatctaattctggaaaatatatatgccaaatcaaaaacgatgctggaatgagagaatgctctgcagtcttgactgtactagaaccagcaagaatcatagagaagcccgaacccatgactgtcactactggaaatccttttgcattagagtgtgtagtgactggaacaccagaactctcagccaagtggttcaaagatggaagagaattgtctgcagacagcaaacatcacattacattcatcaataaagtggcttcccttaaaatcccctgtgccgaaatgagtgacaaaggattatatagctttgaagtgaaaaacagtgttggcaaaagtaactgcactgtatccgtccatgtttctgatcggattgtgcctccttccttcatccgcaagctgaaagacgtgaatgccatcctgggggcctcagttgttttggagtgccgagtctctggctcagccccgatttcagttggctggtttcaggatggaaatgagattgttagtgggcccaaatgtcagtccagcttttcggaaaacgtctgtactttgaatctgagcttgttggagccctccgacacaggcatatacacgtgtgtggctgccaatgtagctggttccgatgagtgctcagcagtcctgactgtgcaagaaccaccatcttttgaacaaacccctgattctgtggaagttttgcctggaatgagcctcacattcaccagtgtcatcagaggcacccctcctttcaaggtcaagtggtttaaaggcagcagggaactggtgcctggggagtcatgcaacatctctctggaagattttgtcacagaactggagttgtttgaggtgcagccattagaaagtggagactattcttgcctcgttacaaatgatgctggcagtgcttcctgtaccacacatctttttgtgaaagaaccagccacctttgtgaaaagattggctgatttcagtgttgagacaggaagccccatagttctcgaggccacatacactggcacacctccaatctcagtgagctggataaaggacgagtatcttatttcacaatctgagagatgcagtattactatgacagaaaaatctaccatactggaaattcttgagagcacaatagaggattatgcacagtacagctgcctgatagaaaatgaggctggtcaagatatctgtgaagctctggtgtctgtcttagaaccaccgtactttattgaacctctggaacatgtggaagcagtcattggagaacctgcaactttacagtgtaaagtggatggaactccagaaattagaatttcttggtataaagaacacacaaagctacgatcagctcctgcatataaaatgcaattcaaaaataacgttgcttccttagtaatcaacaaagtggatcacagtgatgtgggagagtattcatgcaaggcagacaacagtgtgggggcagtcgcttcttcagctgtgcttgttatcaaagcgcgcaaacttccacctttctttgcaagaaaactgaaagacgttcatgagactctaggcttcccagttgcatttgaatgccgcatcaatggctcagaacctcttcaagtgtcttggtacaaggatggggttcttttgaaagatgatgctaatttgcagacatcttttgttcataatgtagcaactcttcagattttacaaactgaccagagccacatagggcagtataattgctctgcttctaatcctcttgggactgcttcatccagtgccaagctcattctctcagagcatgaagtgcctcctttctttgatctaaagcctgtatcagtagatcttgctcttggagaaagtggtacttttaaatgtcatgtaactgggactgcaccaatcaaaatcacttgggccaaagataaccgagagattcgccctggaggcaactacaagatgactttggtagaaaatactgccactctgacagttctcaaagtaggcaaaggcgatgccgggcagtacacctgctatgcaagcaacatcgctggaaaagactcttgttctgctcagctgggtgtacaagaaccacccaggttcattaagaagctagaaccttcaagaattgtgaaacaggatgaattcacaaggtatgaatgcaaaatcggtgggtctccagaaatcaaagttttatggtataaggacgagactgaaattcaagagagcagtaaattcagaatgtcattcgttgactcggtggctgtgctggaaatgcacaatctcagtgttgaagacagtggagactacacctgtgaggcccacaatgcagcaggcagtgccagcagcagcacatccttaaaagttaaagaaccacccattttccgcaaaaagcctcatcctatagagacactgaaaggagctgatgttcaccttgaatgtgagcttcagggcactcccccatttcacgtttcttggtataaagacaagagagaacttaggagcggcaagaagtacaagataatgtctgagaacttcctaaccagtatccacatcctgaatgtcgatgctgcagacattggggaatatcagtgtaaagccacaaatgatgtgggaagcgacacttgcgttggttccatcgctctcaaagcaccaccaagatttgtgaagaagctcagtgacatatctactgtcgttggtaaagaagttcagctgcagactaccattgaaggcgctgaacccatttcagtggtgtggttcaaagataagggagaaatcgttagagaaagtgacaacatatggatttcttattcagaaaacattgcaaccttacagttttcaagagtggaaccagccaatgctggaaaatacacttgtcagatcaaaaacgatgctgggatgcaagagtgcttcgccacgctatccgttctcgagcctgcaacaattgtagaaaagccagaatccataaaagttaccacgggagacacctgtaccttggagtgtacagtagctggcacccctgaactcagtactaagtggtttaaggatggaaaagagctaacaagtgacaacaaatacaaaataagcttcttcaacaaagtatctggccttaagatcatcaatgtagcaccgagtgacagtggggtatacagttttgaggtgcagaaccctgttggcaaagacagctgcacagcttcattgcaggtttcagaccgaaccgttcctccttcattcacaagaaaattgaaagagacaaatggtctatccggctcctcagttgtaatggagtgtaaagtctatgggtcacctccaatctctgtctcctggttccatgaaggaaatgagatcagtagtggaaggaaataccagaccaccctgacagataatacttgtgctttaactgtgaacatgctggaagaatcagacagtggtgactacacatgtatagctactaatatggctggttctgatgaatgtagtgctcctttgactgtgagagaaccaccatcttttgttcagaaacctgatcccatggatgttttaactgggaccaatgtaactttcacaagtatcgtaaaaggaacacctcctttcagtgttagctggttcaaaggtagcagtgaactagtaccaggtgacagatgcaacgtgtctttggaggattcagttgctgaactggagttgttcgatgtagatacatcacaaagtggagaatatacttgcatagttagcaatgaagctggcaaggcttcttgtacaacacatctctacataaaagccccagccaaatttgtgaagaggctgaatgattacagcatagagaaaggaaaacccctgatcctagagggtacattcactggaactcctcccatttcggttacctggaagaaaaatggcataaatgtaactccttctcagaggtgtaatataactacgactgaaaaatcggcaatcctggaaattccaagtagcacagtagaggatgcaggacaatacaactgctacattgaaaatgcctctggaaaagattcctgttcagcacaaatactcatactagaaccaccgtattttgtcaagcagttggagccggttaaggtgtctgttggagattctgcctctctacaatgccagcttgctggaacccctgaaattggggtatcctggtataaaggagatacaaaattgagacccactacgacttacaaaatgcattttaggaataatgttgctacactggttttcaaccaggttgatattaatgatagtggagaatatatctgcaaagctgaaaacagcgtgggagaagtttctgcatcaactttccttaccgttcaagagcaaaaacttccaccatcattttctcgacaattgagagatgttcaagaaacagttggactgccagttgtttttgattgtgccataagtggatcagaacctatctccgtgtcttggtataaagacggcaagccattgaaagacagcccaaatgtacaaacatcatttttagacaatacagccacactcaatatttttaaaactgaccggagccttgcaggccagtattcctgcacagctacaaaccctataggctctgcttcttccagtgccaggctcattctcacagaggggaagaacccacccttctttgacatccgtcttgcccctgtggatgctgtggtgggagaaagtgctgactttgagtgccacgtcacgggcacacaaccgataaaggtcagctgggccaaagacagcagagaaatacgaagtggcggaaagtaccagattagttatctggaaaacagcgcccacctgacagtcctcaaagtagacaaaggagattctggacaatatacctgctatgctgtgaatgaagtgggaaaagactcttgcacagctcagctgaatataaaagagcggctcatcccaccaagtttcactaaaagactctcagagacagtagaagaaacagaagggaattctttcaaacttgagggacgtgtggctggttcccaacctataactgttgcctggtacaaaaataatatagagatacaaccaacttctaactgtgaaataacattcaagaacaacacgttagtgctgcaagtcaggaaagcaggcatgaacgacgctggtttgtacacatgcaaagtgtccaatgatgcaggctctgctctgtgcacgtcttcaatcgtcatcaaagaacctaagaagccacctgtatttgatcagcaccttactccagtaacagtgagtgaaggagaatacgtgcagctcagctgccatgtccagggatctgagccaattaggatccagtggttgaaggctggcagggaaataaagccttcagacagatgcagcttcagctttgctagtgggacagctgtactggaactcagagatgtggctaaagcagattcgggagattatgtgtgtaaagcttcaaatgtggctggaagtgacactaccaaatcaaaagtgaccattaaagacaaaccagctgtggccccagcaaccaagaaagctgcggtagatggaagactcttttttgtgtcagaacctcagagtatcagagtcgtagaaaaaaccactgcgaccttcattgcaaaagttggaggtgacccaatcccaaatgttaaatggacaaaagggaagtggagacagctgaaccaaggaggtcgtgttttcatccaccaaaaaggcgatgaagcaaaactggagattagggacaccacaaaaactgattctgggttataccgatgcgtggcatttaacgaacatggtgaaattgaaagtaatgttaacttacaggtggatgaaaggaagaaacaagagaaaattgaaggcgatcttagagcaatgctgaaaaagactccaatcttaaagaaaggagctggagaagaagaggaaattgatatcatggaacttctcaaaaatgttgatcctaaagaatatgaaaaatatgcccgcatgtatggaatcactgacttccgaggtcttcttcaagcatttgaactgctcaagcaaagccaagaagaagagacacatagactggaaattgaggaaatagagaggtcagagagggacgaaaaggaatttgaggaacttgtatcatttattcagcaaagactgtcacagacagagcctgtcactctgatcaaggacattgaaaatcagacagttttgaaagataatgatgctgtctttgaaattgacattaaaattaattatccagaaatcaagctttcgtggtacaaaggaactgaaaaactggaacccagtgataaatttgaaataagcattgatggtgaccgacatacactcagagtcaaaaactgtcaacttaaagaccagggcaattatcgattggtttgtggtccacacatcgctagcgctaaactaactgtaattgagcctgcatgggaacggcatcttcaggatgtgactctgaaagaaggccagacttgcaccatgacatgccaattttctgtaccaaatgtaaaatctgaatggttcagaaatggcagaatccttaaaccccaaggtagacataaaacagaagtggaacacaaagtccataaattgaccattgcagatgttcgagcagaagaccagggtcagtacacctgcaaatatgaagaccttgaaacttcagcagaactcagaatcgaagctgaaccaattcagtttacaaagcgcatacagaacatcgtggtgagtgagcatcagtctgccacctttgagtgtgaagtgtcctttgatgatgccattgtaacatggtacaaaggaccaacagaactgacagagagccagaaatacaacttcaggaatgatggccgctgccattatatgaccatccacaatgtgaccccagacgatgaaggtgtctactcggtcatcgctcggctggagccaagaggtgaagcaagaagcacggcagagctgtacctaacgacgaaagaaatcaaacttgagctgaagcctcctgatattcctgactccagagttccaatcccaaccatgcctatcagagcagtgccaccagaagaaatccctcctgtggttgctcctcctatcccccttttgctaccaacacccgaagaaaagaaaccaccaccaaaacgtattgaagttaccaaaaaggctgtgaagaaagatgccaaaaaagttgttgcaaagcccaaagagatgacaccacgtgaagagattgtcaagaagcctccacctcctactaccttaattccagcaaaagctcctgaaatcattgatgtatcctctaaagctgaagaagtaaaaataatgactataaccagaaagaaagaggttcagaaagaaaaagaagctgtgtatgagaaaaagcaagcagtccacaaggagaagagagtcttcattgaatctttcgaagaaccttatgacgaactggaggtagaaccatacacagagccatttgaacaaccttattatgaagaaccagatgaagactatgaagagattaaggtagaagctaaaaaagaagttcacgaggaatgggaagaagattttgaagaagggcaagaatactatgaaagggaagaaggctatgacgaaggggaggaagagtgggaagaggcttaccaagaaagggaagtaattcaagttcaaaaggaggtctatgaagaatcacatgagagaaaagttccagccaaagtacctgaaaagaaagcaccaccacctcctaaagttataaagaagccagtaattgaaaaaattgaaaagacttctcgaagaatggaggaagaaaaagttcaagtcaccaaagtacctgaagtttcaaagaagattgttccacaaaaaccttcccggactccagtacaggaagaagttattgaagtgaaagtaccagctgtgcatacaaagaagatggttatttcagaagaaaagatgttctttgcttctcacacagaggaggaggtgtcagtcacagtccccgaggtacaaaaggaaattgttactgaagagaaaattcacgttgccatttccaaaagggttgaaccaccacctaaagtccctgagctacctgagaaaccagctccagaagaagtggcccctgttcctatccctaaaaaagtggagcccccagcaccaaaagttcctgaggttcccaagaaacccgtgccagaggagaaaaagccagttcctgtgcctaagaaggaacctgctgctcccccaaaagtcccagaggtgccaaagaaacctgtccctgaagaaaagattcccgttcctgttgcaaagaaaaaggaagctcccccagctaaagttcctgaagtacagaagggagttgtgacagaagaaaaaataaccattgtaactcaaagagaggaatctccaccaccagcagtgccagaaataccaaagaagaaagttcctgaagaaaggaaacctgttcctcggaaggaggaagaagttccaccaccaccaaaagtgccagctctgcctaagaaacccgtcccagaggagaaagttgcagtgccagttcctgtcgctaagaaagctcctcctccccgagctgaagtctctaagaaaactgttgtagaagaaaagagatttgttgctgaagaaaaactatccttcgcagttcctcaaagagtggaagtcacgcggcacgaagtatctgcagaggaggaatggagttactcagaagaggaggaaggtgtgtccatttcagtttatagagaagaagaaagagaggaggaggaagaagcagaggttacagaatatgaagtgatggaagagcctgaggaatatgttgtggaagaaaagctgcacattatttctaagagagtggaagctgagccagctgaagtgacagagaggcaggagaagaaaattgtactgaaaccaaaaattcctgctaaaatagaggagcctccaccggctaaagttcctgaagcacctaagaaaattgtgccagaaaagaaagttcctgctccagttcctaaaaaggaaaaggtgcccccacctaaagtgccagaagagccaaagaaaccagttccagaaaaaaaggttcctccaaaagtcattaagatggaagaacctctcccagccaaagtgactgagaggcacatgcaaattacccaggaagaaaaagttcttgttgctgtaactaaaaaagaggcgcctccaaaagcaagagtgccagaggaaccgaagagagctgtcccagaagaaaaagttctgaaactcaaacctaaaagagaggaggaaccaccagctaaagtgactgaattcagaaaaagagtggttaaagaagaaaaagtatcaattgaagctccaaaaagagaacctcaacccatcaaagaagtaactataatggaagagaaagaaagggcttataccctagaagaagaagctgtttcagtacaacgggaagaagaatatgaggaatatgaagaatatgattataaagaatttgaggagtatgaaccaacagaagaatatgaccaatatgaagaatacgaggagcgggagtatgaacgatatgaagagcatgaagaatacatcacagaaccagagaagcctatccctgtaaagcctgtcccagaagaaccagttcccacaaaaccaaaggccccaccggctaaagtgctgaagaaagctgtccctgaagaaaaagtaccagtgcccattcctaagaaactcaaacctccaccacccaaagtgcctgaagaaccaaagaaagtttttgaggaaaaaatacgtatttcaattaccaaacgtgaaaaagagcaggtgactgaacccgctgctaaagtgcccatgaagcccaagagggttgtcgcagaagaaaaagtacctgtccctagaaaagaagtagcaccacctgttagagtgccagaagtgcctaaagaacttgaaccagaagaggttgcctttgaagaggaagttgtaacccatgtagaagaatatcttgtagaagaagaagaagagtacattcatgaagaagaggagttcataactgaggaagaagtggtgccagtgataccagtcaaagtgcctgaggtacccaggaaacctgttccagaagagaagaaacctgttcctgttcccaagaagaaggaagctccaccggcaaaagtgcctgaggttcctaagaagccagaggagaaagttcctgtgcttattcctaaaaaggagaagcctccgccagcaaaagttcctgaagtgcccaagaaacctgtgccagaggagaaagtaccagtaccagttcctaaaaaggtggaagctccacctgccaaagtgccagaggtacccaagaagcctgtgcctgagaagaaggtgccagttcctgctcctaagaaagtggaggctccacctgcaaaagtgccagaggtgcccaagaagctcatcccagaagaaaagaaaccaacacctgttccgaaaaaagtggaagcaccaccacccaaagtgccaaagaaacgtgaaccagttccagttcctgtagctctacctcaggaagaggaagttctatttgaagaagaaattgttcctgaagaggaagttctacctgaggaagaggaagttctacctgaggaagaggaagttctacctgaagaagaggaagttctacctgaagaagaggaaattccacctgaggaagaggaagttcctcccgaagaagaatatgtacctgaggaagaagaatttgtacctgaagaagaagtccttccagaagttaaacctaaggtgccagtacctgcaccagtgcctgaagtgccaaagaaacctgtaccagagaagaaagtccctgttcccgcccctaaaaaagtggaacctccaccaccacccaaagtgcctgaaattaagaagaaagtgacagagaagaaagtggtcattcccaagaaagaggaggctccccctgccaaagttcctgaggtgcctaagaaggtggaagaaaaacgaatcattctccctaaagaagaggaagttctaccagttgaagtgactgaggagcctgaagaagagcctatttcagaagaagaaatcccagaagaaccacctagcatagaggaagttgaagaggtggcaccacctagagtgcctgaagtgattaagaaagcagtacctgaagcacctactcctgttcctaaaaaagtggaggcaccaccagctaaagtgtcaaagaaaattcctgaggaaaaagtacctgttcctgttcagaaaaaagaggcacccccagccaaagtgcctgaagtaccaaagaaagtcccagaaaagaaagtccttgtgcctaaaaaggaagctgttcccccagctaaagggagaactgtccttgaagaaaaagtatcagttgccttccgccaagaagtagtagtaaaagaaagactagaattagaagtagtagaagcagaagtggaagaaattccggaagaagaagagttccatgaagttgaagaatattttgaagaaggcgagtttcatgaagtagaagaattcatcaaattagaacaacatagagttgaagaagaacacagagttgaaaaagttcatagggtaatagaagtttttgaggctgaagaagtggaagtatttgaaaaaccaaaagctccacctaaagggcctgagatatctgagaaaatcatccctccaaaaaaaccgcccactaaagttgttcctcgaaaagagccaccagctaaagtaccggaggtgcctaagaaaattgtggtagaagaaaaagtacgtgttcctgaagagcccagagttccaccaactaaagcacccgaagtacccaagaaaattgtcccagaagaaaaagttcgtgaagctgttctgaaaaagcctgaagttccaccagctaaagtacttgtgactcaacctcaaaagacaaaacccaaactagcaaaagtgcctgagccacccaagaaagttgttccagaagacaaaatatatgtgactattcctaaaaagagagaaacaccagcaactaaagaacctgatacaaccagaggcatttttccagaggtggagccacctgaggctattcctgaaattccagaacatcctccaactgaagagtttgaagtcttcaaggaagtcattccagagggagaaactcctattgttaaaagaagaaaaacaccatcaccaacagcaccagaagctatgaaagaagttgtccctgaaatgaaaatatttgaggatgtacctgaagagccagaaactccacgtatgaaaacgcccgaagctcctcaagaaattattcctgccaagacagttccttccaaaaaaagagaacccccatcagttaaagtgcctgaagctctccaagaaattgtccctgaaaagaaaacgcttgtggttcctctcagaaagcctgaagtccttcctgatgaagtgccggaggctctcagagaagttgtcccggaaaagaaagtgcatcctccccaaagggctgaagttgtacctgtcaaagtgcacgaagctcccaaagagattatccctgaaaagaaagtgtcggtggtgcctcctaaaaagcctgaagtcccacctgttaaagtgccagaagcttccaaagaggttatccgcgaagagaaagtgcccttggctcctcctaaagagcctgaagtcccacctgttaaagtaccagagcctcccaaagaagtagttcctgaaaagaaagcgccagtggctcctcctaaagagcctgaagtcccacctgttaaagtgcctgaggctcccaaagaagttgttcctgaaaagaaagtgccagtgcctcctcctaaaaagcctgaagtgccacccacaaaagtcccagaggtgccaaaggcagctgtcccagaaaagaaggtgcctgaagctattcctcccaaaccggaaagtcctccccctgaagtgcctgaagtgctgccaccgaaggaagtggtcccagaaaagaaagtaccggtgcctcctgccaaaaagccagaagctccacctcctaaagttcctgaagctcctaaagaagttgtacttgaaaagaaagcatctgtggctgtgcccaaaaaaccggaagccccacgtgcaaaagtgcctgaagctgctcaagaagttgtcccagaaaagaaaattcccaaggcaccaatcaaaaaaccagaagcccccgcagttacagtgccagaagttcctcaagaagccgcagaaaaagaaattcccgtggctccacccaaaaaaccagaagctccaattgtcccagtgcctgaagtcccacaagaaattgtgccagaaaagaaaacactggtgcttcctaaaaagccagaagttccacctgttacagtgccagaggctcccaaagaagttgtccttgaaaagaaagtgcccttggctcctcctaaaaagcctgaagtcccacctgttaaagtgccagaggctcccaaagaagttgttcctgaaaagaaagtgccagtgactcctcctaaaaaacctgaagtcccacctgttaaagtgccagaggctcccatagaggttgttcctgaaaagaaaatgcccttggctcctcctaaaaagcctgaagtccctcctgttaaagtaccagaggctcccaaagaggttgttcctgaaaagaaagtgccctcggctcctcctaaaaagcctgaagtcccacctgttaaagtgccagaggctccgaaagaagttgttcctgaaaagaaagtgccagcggctcctcctaaaaagcctgaagtcacacctgttaaagtgcctgaggctcccaaagaagttgttcctgaaaagaaagtgccagtgcctcctcctaaaaagcctgaagtgccacccacaaaagtcccagaggtgccaaaggtagctgtcccagaaaagaaggtgcctgaagctattcctcccaaaccggaaagtcctccccctgaagtgttcgaggagcctgaggaagttgccctagaagagcctcctgctgaagttgtggaagagccagagccagcggcgcctccacaagtgaccgtaccacctaagaaacctgtcccagaaaagaaagcacctgctgtcgttgccaaaaaacctgaactaccaccagtgaaagtgcccgaggtgcccaaggaggttgttcctgaaaagaaggtgcctctggtggttcccaaaaagccagaagccccacctgctaaagtgcctgaagttccaaaagaagttgttccagaaaagaaagtagctgttcccaaaaagccagaagtcccaccagcaaaagtgccagaagtgccaaagaaacctgtcttggaagagaaaccagctgttcctgttccagaaagagcggagtctcctcccccagaagtatatgaagaacctgaggaaattgctcctgaagaggaaattgctcctgaagaggaaaagccagttcctgttgcagaagaggaggaaccagaggttccacctccagcagtgcctgaagagcccaagaagatcatcccagagaagaaagttcctgtcatcaaaaaaccagaagcaccgcctcctaaagaacgtgaaattgaaaagtatattaaacctgaagagcccgaacctgaaccacagcctgaagaaataccagtaaaagaacctgaacctgaaaaggttattgagaagccaaaactcaaaccaagacccccacctcctccacctgctccacctaaggaagatgtgaaggagaaaatattccaacttaaagctattccaaagaagaaagttcctgaaaaacctcaggttccagaaaaagtggagcttacacctctgaaagtgcctggaggtgaaaagaaagttcgcaaattacttccggaacgtaaacctgaaccaaaggaagaagttgttctgaaaagcgttctaagaaaaagacctgaagaagaagaacctaaagtagaacctaaaaaactagaaaaagttaaaaaacctgcagtaccagaaccaccacctccaaaacctgttgaagaggttgaagtacctactgttacaaaaagggaaaggaagattcctgaaccaacaaaagtgcctgaaatcaagccagcaatacctctccctgcacctgaaccgaaaccaaagcccgaagcagaagtgaaaacaatcaaaccacctcctgtggaacctgaaccaacccccatcgctgccccagtaacagtgccagtggttggaaagaaagcagaagccaaagcacctaaggaagaggctgccaagccaaaaggtcctatcaaaggtgtacccaaaaagactccttcaccaatagaagccgaaaggagaaagttaaggccaggaagtggtggagagaaacctcctgatgaagccccgttcacctaccagctaaaggctgtgccactgaagtttgtgaaagaaatcaaagacatcatcttgacagaatcagagttcgttggctcttcagcaatctttgaatgtttggtctccccttccactgcaattacaacctggatgaaagacggtagcaatatccgtgagagtcccaagcacaggtttattgcagatggtaaagacagaaagctgcacatcattgatgttcaactttccgatgctggtgaatacacctgtgttttacgtttgggaaacaaagaaaagacctccacggctaaacttgttgtagaagaacttcctgtgcgttttgtaaaaacactggaagaggaagtcacagtggtcaaaggacagccattgtacttgagctgcgagttaaacaaagagcgtgacgtggtctggaggaaggatggcaagattgtggtggagaaacctggccgaattgtgccaggcgtcattggcttgatgcgggctctgaccatcaacgatgcagatgacacagatgctggaacatacacagttactgtggaaaacgccaacaacctggagtgttcatcttgcgtaaaagtagtagaagtcattagagattggctggtgaaacctatacgagaccagcatgtgaaacccaaggggacagctatttttgcctgtgatatagcaaaagatactccaaacattaagtggttcaaaggatatgatgaaatccctgcggaaccaaatgataagactgaaatactgagagatggaaatcatctgtacctcaaaattaagaatgctatgccagaagatattgctgagtatgcagtggaaattgaaggaaaaagataccctgcaaagctgacacttggagagcgtgaagttgaactgcttaaaccaatagaggacgttaccatttatgagaaagaaagtgcaagctttgatgcagaaatctcagaggcagacattcctggacaatggaaactgaaaggagaacttctaaggccctcacctacttgtgaaatcaaagcagaaggtggaaaacgcttcttaactttgcacaaagtcaaactggaccaagctggtgaagtcctctaccaggcccttaatgcaattacaactgccattttgacagtaaaagaaatcgaacttgactttgctgtgcccctgaaggatgtcactgttccagaaaggcgacaggctcgattcgaatgtgtcctcacccgagaggcaaatgttatatggtccaaaggacctgatataattaagtcatctgacaaatttgatatcatcgctgatggaaagaaacatattcttgttattaatgattctcaatttgatgatgaaggggtctatactgctgaggtggagggcaagaagacctcagctcggttgtttgtcacaggtataagactgaaattcatgtcacctcttgaagatcaaacagtaaaagaaggtgaaacagcaacttttgtttgtgaactttctcatgaaaaaatgcatgtagtctggttcaaaaatgatgccaaactccatacaagcagaacagtactcatctcttctgagggcaagactcacaaattggaaatgaaagaagtgacattggatgatatatctcagataaaagctcaagtcaaggagctgagctccacagcacagctgaaggtcttagaggccgatccctacttcactgtgaaattacatgacaaaactgcagtggagaaggatgagattactttgaagtgtgaagtgagcaaagatgtaccagtgaaatggttcaaagatggtgaagagattgtcccttcacccaaatattctatcaaggcagatggcctgcgccgcatcttaaaaatcaaaaaggcggaccttaaagataaaggcgaatatgtgtgtgactgtggcacagacaagaccaaggcaaatgttactgttgaggctcgactaataaaagtggaaaagcctctgtacggagtagaggtgtttgttggtgaaacagcccactttgaaattgaactttctgaacctgatgttcacggccagtggaagctgaaaggacagcctttgacagcttcccctgactgtgaaatcattgaggatggaaagaagcatattctgatccttcataactgtcagctgggtatgacaggagaggtttccttccaggctgctaatgccaaatctgcagccaatctgaaagtgaaagaattgcctcttatcttcatcacacctctcagtgatgttaaagtcttcgagaaagatgaggctaagtttgagtgtgaagtatccagggagcccaaaacattccgttggctaaaaggaacccaggaaatcacaggtgatgacagatttgagcttataaaggatggcactaagcattcaatggtgatcaagtcagctgcttttgaagatgaagcaaaatacatgtttgaagctgaagataagcacacaagtggcaaactgatcattgaaggaatccggctcaaattcctcacccctctcaaagatgtaactgccaaagagaaggaaagtgctgtatttactgtggagttatctcatgataacatccgagttaaatggttcaagaatgaccagcgcctacacaccaccaggtcggtctcaatgcaagacgaagggaaaactcattcgatcacattcaaagacctgtctattgatgacacctcccaaattagagtagaagctatggggatgagttcagaagctaaactcactgtgcttgagggagacccatattttacaggaaaacttcaagattatactggtgtagagaaagatgaagttattctacagtgtgaaattagcaaagcagatgcaccagtgaaatggtttaaggatgggaaggaaataaagccatccaaaaatgctgttattaaggcagatggcaagaaacgcatgctaatcctaaagaaagccttgaaatcagatattggacagtacacctgtgactgtgggacagataagacctcaggaaaacttgacattgaggatcgggaaattaaactggtgcgacccctgcacagtgtggaggtgatggagactgagacagcacgctttgaaaccgaaatctctgaagatgatatccacgccaactggaaactcaagggagaggccctactccaaacacctgattgtgaaattaaggaagaaggcaaaatacactcccttgttttgcacaactgtcgcctggaccagacgggtggggtggatttccaagctgccaatgttaaatctagtgcccacctccgagttaagccacgagtaattggtcttctgaggcctttaaaggatgtcaccgtgactgcaggggaaacagccaccttcgactgcgagctctcctacgaagatatcccagtggaatggtatctcaaagggaagaaactagagcccagcgataaggtggtcccacgttcagaaggaaaagttcatacacttactctgagggatgtaaagttagaagatgctggggaagtccaactaacagcaaaagatttcaaaactcacgccaacctctttgtgaaagaacccccagttgaattcactaagcctcttgaggaccagacggtcgaagagggagccactgcagtgctggagtgtgaagtctccagagaaaatgctaaggtgaaatggttcaaaaatgggacagaaatcctcaaaagcaagaagtatgaaattgttgctgatggcagggtcagaaaacttgttatacatgactgtaccccagaggatattaaaacatacacttgtgatgctaaggattttaagacttcctgtaacctgaatgtcgtgcctcctcatgtggaattcttaagaccactcaccgaccttcaagttagagaaaaagaaatggctcgatttgagtgtgaactttcccgagaaaatgctaaggttaagtggtttaaagatggtgctgaaattaaaaagggcaaaaaatatgacatcatatccaagggagcagtgcgcattcttgtcatcaacaaatgtctactggatgatgaagctgaatattcctgtgaagtaaggacagcgagaacttctggcatgctgacagttctggaagaagaagctgtctttaccaaaaatcttgccaacattgaagttagtgaaacagacactataaaactggtttgtgaagtctccaaacctggcgcagaagtgatttggtataaaggggatgaggagatcattgaaacaggaagatatgaaatactgactgaaggacggaagagaatcctggtcattcagaacgctcaccttgaggatgctggcaactacaactgtcgactcccaagctctcgaaccgatggcaaagtcaaagtacatgaactggctgctgaatttatctcaaagcctcaaaaccttgaaatacttgaaggagaaaaggctgaatttgtctgctctatatcaaaagaaagctttccagtccagtggaagagggatgataagacacttgaatctggagataaatatgacgttattgctgatggtaaaaagagggtcctagttgtgaaagatgccacattacaagatatgggcacttacgttgtcatggtaggggccgccagagcagcagctcacttgacagtcattgaaaaactcaggatcgtagttcctcttaaggacacccgggtgaaggaacaacaggaagttgtcttcaactgtgaagtcaatactgaaggtgccaaagccaaatggttcagaaatgaagaagctatatttgatagttcaaaatacatcattctccaaaaagacctagtctacaccctcagaattagagatgcacacttagatgaccaagccaactataatgtgtctttgaccaatcacagaggtgaaaatgttaaaagtgcagccaatctaatagtagaagaggaagaccttaggattgttgagcctcttaaagatattgaaacaatggagaagaaatctgtcacattctggtgcaaggtgaatcgtctcaatgtaacactgaagtggaccaaaaatggtgaagaagtgccttttgacaaccgtgtctcatacagagttgataagtacaagcacatgttaaccattaaagactgtggcttcccagatgaaggtgaatacattgtcactgctggacaagataaatctgttgctgagcttctcatcatagaagccccgacagaatttgtggaacacttggaagatcagacagtcactgagttcgatgacgctgtcttctcctgccagctctccagagagaaagccaatgtaaaatggtacagaaatgggagagaaatcaaagaaggcaaaaaatacaaatttgaaaaagatggaagtatacacagactcattataaaagattgcaggctggatgatgagtgtgaatatgcttgcggggtagaagacaggaagtctcgtgctagactttttgtggaagaaattcctgttgagatcatcaggcctccacaagatattcttgaagcccctggtgctgatgttgtctttttagcagaactcaataaagataaggtggaagtccaatggctaagaaataacatggttgttgtccagggtgataaacaccagatgatgagtgaaggaaagatacatcgactacagatttgtgatattaagccccgtgaccagggtgaatacagatttattgccaaagacaaagaagccagagctaagcttgaactggcagctgcaccaaaaatcaagacagctgaccaagaccttgtggttgatgttggcaagcctctgacaatggtggtgccatatgatgcctaccccaaagcagaagctgaatggtttaaagaaaatgaacctttatctacaaaaaccattgatactacggctgaacaaacttctttcagaattttagaagccaagaaaggagacaaagggaggtataaaattgtgcttcagaacaaacatggaaaagcagaaggattcatcaatttaaaagttattgatgttcctgggccagtacgtaacttagaagtgacagaaacatttgatggtgaagtgagccttgcttgggaagaacctttaactgatggtggaagcaaaatcataggttacgttgttgaaagacgtgacattaagagaaagacctgggttctggccacagaccgtgcagagagttgtgagtttactgtcactggtctacagaaaggaggagttgagtacctattccgtgtgagtgcaagaaacagagttggcactggtgagccagtagaaactgacaatcctgtagaagcaaggagtaaatatgatgttccaggccctcctttgaatgtaaccatcactgatgtgaatcgatttggtgtctcactgacatgggaaccaccagagtatgatggaggtgctgagatcacaaactacgtcattgaattaagagacaagacttctatcaggtgggatactgccatgactgtgagagctgaagacctgtctgcaactgttactgatgtggtagaaggacaggagtacagtttccgagtgagagcccaaaatcgaattggagttggaaaaccaagtgcagccacacccttcgtcaaagttgctgatccaattgagagaccaagtcctcctgtaaacctaacttcctcagatcagactcagtcatcagttcagctcaaatgggaacctcctctgaaagatggaggaagcccaatattaggctatataattgagcgatgcgaagaaggaaaagataattggattcgttgcaatatgaaacttgtccctgaactgacttacaaggttaccggattggaaaaaggaaataaatatttatatagagtatctgcagaaaataaagctggtgtttcagatccatctgaaattcttggtcctctcaccgctgacgatgcatttgttgaaccaacaatggatttaagtgcatttaaagatggtctggaagttattgtcccaaatcctatcacgatcctggttccaagtacaggctatccaaggccaactgcaacctggtgttttggagataaagtactagaaacaggggaccgggtgaaaatgaagaccttgtctgcctatgccgaacttgtcatttctccaagtgaacgttcagacaagggcatttatacactgaaattagaaaaccgtgtgaaaacaatttctggggaaattgatgtcaatgtaattgctcgcccaagtgcacccaaagaattgaaatttggtgatataaccaaggactcagtacatttgacttgggaaccacctgatgatgatggaggaagtccgttaactggatacgttgttgaaaaacgagaagtcagccggaaaacatggactaaagttatggactttgtgactgatctagaattcacagttcctgatcttgttcaaggaaaagagtacttatttaaagtttgtgctcgtaacaaatgtggccctggagaacctgcatatgttgatgaacctgtaaatatgtcaactcctgcaacggtacctgacccaccagagaatgttaaatggagagatcgaacagccaatagcatcttcttaacatgggatccacctaaaaatgatggtggttcacgcatcaaaggatatatagttgaaagatgtccacgtggttctgataaatgggttgcctgtggagaacctgttgcagaaacaaaaatggaagtgacaggtcttgaggaaggcaaatggtatgcctaccgcgtgaaggccttaaacaggcagggtgctagcaaaccaagcagacccacagaggaaatccaggctgtggacacacaagaggccccagaaatcttcctcgatgtgaagctccttgctggtctcactgtaaaagctgggaccaagattgaacttcctgccaccgtaaccggaaaacctgaacctaaaataacttggacaaaggctgatatgattctgaagcaggacaaaagaattaccattgaaaatgtccctaagaaatccacagtgactattgttgatagtaagagaagtgacactggcacatatatcattgaggctgtgaatgtgtgtggccgggccactgctgtggtggaagtgaacgtcttagataaacccggaccaccagctgcctttgacatcacagatgtaaccaatgagtcatgtcttctaacatggaacccaccacgcgatgatggtggatctaagatcacaaactatgttgtggagagacgagcaactgatagtgaagtgtggcacaagctctcatccaccgtcaaggatacaaacttcaaggccaccaaattaatccccaataaagagtacatcttcagagttgctgcagaaaacatgtatggtgttggtgaaccagttcaggcctctccaataacagccaaatatcagtttgatccacctggtcctccaactcgcctagaaccttctgatatcactaaagacgcagtgactctcacatggtgtgagccagatgatgatggtggcagcccaatcacaggatactgggttgaaagactggatcctgatacagataaatgggttagatgcaataagatgccagtaaaggacacaacatacagagtgaaaggtctcactaataagaaaaaatacagattccgtgtgttggctgaaaatcttgctggacctggaaaaccaagcaaatcaactgaaccaatcttaataaaggatcccatagatcctccatggccccctggaaaaccaactgtaaaagatgtaggcaaaacatcagtaaggttgaattggacaaaaccagaacatgatggaggtgcaaagattgagtcttatgtcattgaaatgctgaagactggaacagatgagtgggtcagagtggcggaaggggttcccaccactcagcacttgctcccagggctcatggaaggacaggaatactcattccgagttagagctgtgaataaggctggggaaagtgaacccagtgaacccagtgaccctgtgctttgccgggagaagctatatcctccatcaccaccacgctggcttgaagttattaatatcacaaaaaatacagcagacctaaaatggacagttcctgagaaagatggagggtcccccatcaccaactacattgtggaaaagagagacgtcaggcgaaaaggctggcaaacagtggataccactgtcaaggacaccaagtgcacagtcaccccactgactgagggctctttatatgtgttccgagttgctgcagaaaatgctataggacaaagcgactacaccgaaattgaggactctgtgctggccaaagacacctttaccactcctggaccaccctacgccctggcagtggttgatgtgacaaaacgacatgttgacctaaagtgggagccacctaaaaatgatggtggaagaccaatacagagatatgtcattgagaagaaagaaaggttaggtacccgttgggtgaaagctggaaagactgcaggacctgactgtaacttcagagtaactgatgtcatcgaaggaacagaggtccagtttcaggttcgggctgaaaatgaagctggagttggccacccaagtgaacccacagaaatcctatccattgaagatccaacaagtcctccctcaccaccccttgacctacatgtgactgatgctgggagaaaacacattgccattgcttggaagcctccagagaaaaatggtggaagtcctatcataggataccatgttgaaatgtgtccagtaggcactgagaaatggatgagagttaattctcgcccaataaaggacttgaaattcaaggttgaagaaggtgttgttcctgacaaagaatatgtcctgagagtgagagcagtcaatgctattggtgtcagcgagccatctgaaatctctgaaaatgtggttgccaaagacccagactgcaagccaacaattgacctggagactcatgacattattgttattgaaggtgaaaagttaagcattcctgttcccttcagagctgtcccagttccaactgttagttggcataaagatggcaaagaagttaaagcaagtgatagattaacaatgaagaatgatcacatctctgcacaccttgaagttcccaagagtgtccgtgcagatgccggaatttataccattacactggagaataagctcggctcagcaacagcctcaatcaatgtcaaagtcataggcctacctggaccatgcaaagatattaaagcaagtgacattaccaagagttcttgtaagttaacttgggaacctccagaatttgatggtggaaccccaattcttcattatgtcctggagcgcagagaagctgggaggagaacatatataccagtcatgtctggtgagaacaaactgtcatggactgtgaaggatctcataccaaatggtgaatacttcttccgtgttaaagcagtcaacaaggttggtggaggagaatatattgaactgaaaaatccagtcattgctcaagatccaaagcaaccccctgatccacctgtagatgtagaggttcataatcctacagcggaggcaatgactattacatggaagccacctttgtatgatggagggagcaagataatgggctacatcatagagaagattgctaagggtgaagaaaggtggaagagatgcaatgaacacctggtaccaatcctgacctatacagcaaaaggacttgaagaggggaaagagtaccaattccgtgtgcgagcagagaacgccgcgggtattagtgaaccttctcgggctactcctccaaccaaagctgtagatcccattgatgcccccaaagtcattctgagaacaagcctagaagtgaaacgaggtgatgaaatagcacttgatgcaagtatttctggatcaccttacccaactattacatggataaaggatgaaaatgttattgtaccagaggaaattaagaagcgtgcagcacccttggttaggagaaggaagggtgaagttcaagaagaagaaccatttgtcctgcctctgacacagcgtttgagtattgacaacagcaaaaagggagaatctcagctacgcgtccgagattctctccgacctgaccatggtctgtatatgatcaaagttgaaaatgaccacggtattgcaaaagctccttgtactgtcagtgtgttagatacaccgggaccaccaatcaactttgtatttgaagatatcagaaagacctcagtcctttgtaaatgggaaccaccccttgatgatggtggcagtgaaatcataaactacactttggaaaagaaagacaagacaaaacccgactcagaatggattgttgtcacttcaacacttagacattgcaaatattcagtaacaaaactgattgaaggaaaagagtacctcttccgtgtaagagctgaaaacagatttgggccaggtccaccatgtgtttcaaagccacttgtggctaaagatccatttggaccacctgatgcaccagataagcccattgtggaagatgttaccagcaacagtatgctagtgaaatggaatgaaccaaaagataatggaagccccattttgggttactggcttgaaaaacgtgaagttaacagtacacattggtctcgtgtcaacaaaagccttctgaatgccttgaaagccaatgtagatggcttattagaaggactcacctatgtcttcagagtatgtgctgaaaatgcagctggacctggaaagttcagtccaccttcagatcccaaaacagcacatgatccaatctctcctcctgggccacctatcccaagagtcactgacacaagctctacaactattgaactagaatgggaacccccagctttcaatggtggtggggaaattgttggctattttgttgataagcagttggttggcacaaatgaatggtcacgctgcacagagaagatgatcaaggtccgtcagtacaccgtcaaagaaatccgagagggtgctgattacaaacttcgggtgagtgctgtcaatgccgcaggggaaggaccgcctggagaaacacaacctgttactgtggctgaaccacaagagcctccagctgtggaactggatgtttctgtcaagggtggaatacaaataatggctgggaagactcttagaattccagctgtggtgactggtcgccctgtacctacaaaagtatggaccaaagaagaaggggagctggataaagaccgtgttgtaatagacaacgttggaaccaaatctgaactaattatcaaggatgcactgcgaaaagaccatggcagatatgtgattacagctacaaatagctgtggttccaaatttgcagcagccagggtagaagtttttgatgtccctggtccagttcttgacttaaaacctgttgtaacaaacagaaaaatgtgtctacttaactggtctgatccagaagatgatggaggaagtgaaataacaggctttatcattgaaagaaaagatgccaagatgcatacttggagacaaccaatagagactgagagatctaaatgtgacatcacaggtctgcttgagggacaagaatataagttccgtgttattgccaagaacaagtttggctgtggccctcctgttgaaataggaccaattcttgcagttgatccactaggtcctccaacatctccagagaggctcacatacactgaaaggacaaagtccactatcacacttgactggaaagagccccgcagtaatggtggcagtcccatccaaggatatatcattgaaaaacggcgtcatgacaaacctgactttgaaagagttaacaagcgactctgcccaaccacatcttttctggttgaaaatcttgatgaacaccaaatgtatgagttccgtgtcaaagctgtcaatgaaattggtgaaagtgaaccatccctacctcttaatgtagtcatacaagatgatgaagtgcctccaactattaagttgcgtctgagtgttcgaggagacactatcaaagttaaggcaggagagcctgtccacatccctgcagatgtgacaggccttccaatgcctaagattgaatggtccaaaaatgaaactgtaattgaaaaacccactgatgcacttcagataaccaaggaagaggtatcccgaagtgaggcaaaaactgagcttagcattcccaaagcggtccgggaggacaaaggcacttacacagttactgcttccaatcgccttggctcagtgttccgaaatgttcacgttgaagtatatgaccgcccatccccaccaagaaatcttgctgttactgacattaaagctgaatcttgctacttgacatgggatgcccctcttgataatggtggcagtgaaatcacccattatgttattgacaaacgtgatgcaagtaggaagaaagcagaatgggaggaagtcaccaacactgctgtagagaaaagatatgggatctggaaacttatccccaatggtcagtatgagttccgagtcagggcagtgaataaatatggaatcagtgatgagtgcaaatcagataaagtagtcattcaagatccttatcgccttcctggacctccaggaaaaccaaaagttttggcacgcaccaaaggatcaatgctagtgagctggactcctcctttggacaatggtggctctccaattactggctactggctggagaaaagagaagagggaagtccttattggtcacgtgttagccgagcaccaataaccaaagtgggattgaaaggcgtggaatttaatgttcctcgtttgcttgaaggcgttaaataccagttcagagccatggcaataaatgctgcaggaattggtcctcccagtgaaccatcagatccagaggttgcaggagatcccatatttccaccggggccaccttcttgcccagaagttaaagataaaacgaagtcaagcatctcactaggatggaaacctccagccaaagatggtggcagcccaatcaaaggatacattgtagaaatgcaagaagaaggtactactgactggaaaagagtaaatgaaccagacaaacttataactacctgtgaatgtgtggtgcctaatctgaaagagctcaggaagtacagattcagagtgaaagctgtcaatgaagctggtgaatctgaaccaagtgatacaactggggagatccctgccactgatattcaagaggaaccagaagttttcattgacattggagcacaggactgtctggtttgtaaagctggctcacagattaggattcctgctgtcatcaagggacgcccaacaccaaaatcatcttgggaatttgatggaaaggcaaagaaagcaatgaaggatggagttcatgacatacccgaagatgcacagctggagactgctgaaaactcctcagtaattattattccggagtgtaaacgatctcatacaggcaaatacagcatcacagccaagaataaagcaggacaaaagactgcaaattgcagagttaaagtcatggatgtaccaggcccacccaaagatctgaaagtcagtgatatcacaaggggtagttgcagactttcatggaagatgccagacgacgatggaggagacaggatcaaaggctatgttattgagaagaggactattgatggaaaagcctggaccaaagtcaatccagactgtggaagcaccacatttgtagtgcctgatctcctctctgaacagcaatatttcttccgtgtgcgagcagaaaaccgttttggtattggcccacctgtggaaaccattcagaggaccactgccagagatccgatatatcctcctgatcctcctattaaactcaagattggcctcatcacaaagaacacagtgcatctgtcatggaaacccccgaagaatgatgggggctcccctgttacccactatattgttgagtgccttgcatgggaccctactgggacaaagaaagaagcctggaggcagtgcaataagcgtgatgtggaagaactgcaatttactgttgaagacctagtagagggtggggaatatgaattccgagtcaaagctgtcaatgctgcaggagtcagcaagccttcagccactgttggccctgtgactgtcaaagaccagacatgcccaccatcaattgatctaaaagaattcatggaggttgaagaaggaaccaatgttaacattgtggccaaaattaaaggtgtgccattcccgacactaacctggtttaaagctcctccaaagaagcctgataacaaagaacctgttctctatgacacccatgtcaacaaactggtggtagatgatacttgcactttagttattccgcagtctcgcaggagtgacactggcttatataccatcacagctgtaaataatctgggaacagcatcaaaggagatgagactgaatgtcctgggtcgtcctggccctccagtgggacccataaaatttgaatctgtttcagcagatcaaatgacactatcttggtttccacctaaagatgatggtgggtctaagattacaaactatgtaattgagaaaagagaagctaacaggaagacatgggtccatgtctccagtgaacctaaggagtgcacgtacacgattcccaaattgctagaaggccatgaatatgtattccgaatcatggcccagaataaatatggcattggagaacctcttgacagtgaacctgaaacagcaagaaacctcttctctgtccctggagcaccagataaaccaacagttagcagcgtgactcgtaactccatgactgtcaactgggaagagccagaatatgatggaggctctcctgtgacagggtactggctggaaatgaaagacaccacttcaaagagatggaagagagttaaccgagatcctatcaaagccatgactttgggtgtttcttataaagtgactggtcttattgaaggttccgactatcaattccgggtatatgcaatcaatgctgctggcgtgggtccagcaagtctgccatcagacccagcgactgctagagatccaattgcccctcctggtcctccatttcccaaagtgacagattggactaaatcatctgcagatctggagtggtctcccccactaaaagatggtggatccaaagtaactggatacatcgttgaatataaagaagaaggaaaagaagaatgggaaaagggtaaagataaagaagtgagaggaacaaagcttgttgtgacaggattaaaggaaggagcattctacaaatttagagttagagcagtcaacattgctggcattggagaacctggagaggtcacagatgtcattgaaatgaaggacagacttgtttcacctgaccttcagctagatgccagtgtcagagatagaattgttgtccatgctggaggggtgatccgaatcattgcctatgtgtctggaaagcctcctccaaccgtcacctggaacatgaatgaaagaaccttacctcaagaagccaccattgagaccacagccattagctcatccatggtcatcaagaactgccagaggagccatcaaggcgtctattctcttcttgccaaaaatgaagccggagaaagaaagaagacaattattgttgatgtattagatgttccaggtcccgttggaacaccattcctagctcacaacctaaccaatgagtcctgcaaactgacatggttttctccagaagatgatggaggctctccaatcaccaattatgtcattgaaaagcgtgaatctgaccgcagagcatggaccccagtgacatatacagttacccgacaaaatgctactgtccagggtctcattcaaggaaaagcctactttttccgaattgcggctgaaaatagtattggcatgggtccatttgttgagacatcagaggcacttgttatcagagagccaataactgtaccagagcgtcctgaagacctggaagtcaaagaagttactaaaaatactgtaactttgacttggaatcctcctaagtatgatggtgggtcagaaattattaactatgtcctagaaagtcggctcattgggactgagaagttccacaaagttacaaatgacaacttgcttagcagaaaatacactgttaaaggcttaaaagaaggtgatacctatgagtaccgtgtcagtgctgtcaacattgttggacaaggcaaaccatcattttgcaccaaaccaattacttgcaaggatgagctggcacccccaacgcttcacctcgacttcagagataagctcacgattcgagttggtgaagcttttgccctcactggccgttactcaggcaaaccaaagcctaaggtttcctggttcaaagatgaagctgatgtgctggaagatgatcgcactcatataaagactacaccagcaacacttgctttagagaagatcaaggccaaacgttcagattccggcaaatactgtgtggttgtggagaacagtacaggctctaggaaaggtttctgtcaagttaatgttgttgaccgtcctggaccaccagtaggaccagttagttttgatgaggtgaccaaagattacatggttatctcttggaagcctcctttagatgatggaggcagtaaaatcaccaattatattattgagaagaaggaagtgggtaaagacgtctggatgccagtgacatctgcaagtgctaaaacaacatgcaaagtttctaaactacttgaaggaaaagattatattttccggatacatgctgaaaatctgtatggaataagtgatcctctggtgtctgattcaatgaaagccaaagatcgtttcagggttcctgatgcacctgatcagccaattgttacagaagttaccaaagactctgcattagtaacctggaataagccacatgatggaggaaaacccatcacaaactacatcctggaaaagagagaaactatgtctaaacgatgggctagagttaccaaagatcctattcatccatacactaaatttagggttcctgatcttctagaaggatgtcagtatgaattccgggtttctgcagaaaatgaaattggtattggagatccaagcccaccatccaaaccagtctttgctaaagatccaattgctaaaccaagtccacctgttaatcctgaagcaatagatacaacatgcaattcagtcgatctaacttggcagccaccacgtcatgatggtgggagcaagattctgggttatattgttgagtaccagaaagttggagatgaagagtggagaagagccaatcacacccctgagtcatgtcctgaaactaaatataaagtcaccggtcttcgggacggtcaaacctataagtttagagtgttagcagtcaatgcagctggtgaatcagatccagctcatgttccggagccagtcctagtaaaagacaggcttgaaccccctgagttgattcttgatgccaacatggcaagagaacaacacattaaagttggtgatactctaagacttagtgccatcatcaaaggagtgccattcccaaaagtaacttggaaaaaagaagacagagatgctccaactaaagcaagaattgatgtgactccagttggtagcaagcttgaaattcgtaatgctgcccatgaagatggtggaatttattctttaacagtggagaatccagctggttcaaaaactgtctcagtaaaagtacttgtattagataaacctgggccacctagagatctggaagtcagtgaaattaggaaagattcatgttaccttacttggaaagaaccactggatgatggtggttctgttattaccaattatgtggttgagaggagagatgttgccagcgcccagtggtcacctctctcagctacatcaaagaaaaagagtcacttcgctaagcatctgaatgaaggcaaccagtacctcttccgagtagctgcggagaaccagtatggacgtggtccttttgttgaaacaccaaaaccaatcaaggctttggatcctctccatcccccagggccacccaaggacctgcaccatgtagatgttgacaagactgaagtctccctagtctggaataagccggatcgtgatggtggttctccaatcactggatatttggtagaatatcaagaagaaggcacccaggactggattaaatttaagactgtgacaaacttagagtgtgtggttactggactacaacaaggaaagacctatagattccgtgtaaaagctgaaaacattgtgggtcttggtctccctgacacaactatcccgatagaatgtcaagaaaaactagtgcctccatccgtggagctagatgtgaaattaattgaaggtcttgtggtaaaggctggaaccacagtcagattccctgctattataagaggtgtgcctgttcctactgcaaagtggacaaccgatgggagtgagattaaaaccgatgagcactacacagttgaaacagacaacttctcatcagtacttaccattaagaactgcttaaggagagacactggggaatatcaaatcacagtttccaatgcagccggtagcaaaacagtagccgtacatcttactgttcttgatgttcctgggccaccaacaggtcctattaatattctggatgttactcctgaacacatgactatctcatggcagccacctaaggatgatggaggaagccctgtgataaattatattgttgagaaacaagatacaaggaaagacacgtggggtgttgtctcttccggaagcagtaagacaaagctgaaaatcccacatctgcagaagggctgtgaatatgttttccgagttagagcagagaataagataggtgttggtcctccccttgactccacacctactgttgctaagcataaatttagtcctccgtctcctcctggtaaaccagtggttactgacattactgaaaatgcagcaacagtgtcttggaccctgccaaaatctgatggtggcagtccaataactggctactatatggaacgtcgagaagtaactggcaaatgggtgagggtcaacaaaacacctatcgctgacctgaagttcagagtgactggactctatgaaggaaatacatatgagtttagagtttttgctgaaaatcttgcaggactaagcaaaccatccccaagttctgatccaataaaagcttgccggcccatcaaaccacctggaccacctattaatcctaaactgaaagacaagagcagagaaacagctgatttggtgtggacaaagcctctcagtgatggtggtagccccattctaggatatgtagtggaatgtcagaaacctggcacggcacaatggaacaggattaataaagatgaactcattaggcaatgtgcctttagggtacctggactaattgaaggaaatgagtacagattccgtataaaggcagctaatattgtaggagagggtgagccaagagaactagcagaatctgtgattgcaaaagatatccttcatcctccagaagtagaacttgatgttacttgtcgtgatgttattaccgtgagagtaggccaaactatccgcattctagctcgagtcaaaggcagacctgaaccagacataacttggactaaggaaggcaaagtattggtccgagaaaagagggtggaccttattcaggatctacctcgtgttgagttacaaattaaagaagctgttagagctgatcatggcaagtatatcatctcagctaagaacagcagtggacatgcccaaggttcagccatcgttaacgtccttgacagacctgggccttgccagaatttgaaggttaccaatgtaaccaaagagaactgtacaatttcttgggaaaacccactagataatggtggctcagaaataacaaacttcatagtagaatatcgcaaaccaaaccagaaaggctggtcaattgttgcatcagatgtcactaaacgattaatcaaggccaaccttttagccaacaatgaatactatttccgagtttgtgcagagaataaagtaggtgttgggccaaccatcgaaacaaaaactcccattctggctattaaccctattgacagaccaggtgagcctgaaaaccttcacattgcagataaaggaaagacatttgtctatctaaagtggcggaggcctgactatgatggtggcagtccaaatctgtcatatcatgttgagagaaggcttaagggctccgatgactgggaaagagtgcataaaggaagcattaaagaaactcactacatggttgacagatgtgttgaaaaccagatttatgagttcagagtgcaaacaaagaatgaaggtggggaaagtgactgggtgaagacagaggaagttgttgtgaaagaagacttacaaaaaccagtacttgatctgaaattaagtggggtcctaactgtcaaagcaggggacaccattaggcttgaggcaggggttagaggcaaaccattcccagaagttgcatggaccaaggacaaagacgctacagacttaacaagatcaccaagggtcaagattgatacccgtgctgattcatctaaattttctcttactaaagcaaagcgaagtgatgggggtaaatatgtagttacggcaactaacacggctggcagttttgtggcctatgccactgtcaatgttttagataagcctggtcctgtgagaaatctgaaaattgttgatgtgtccagtgataggtgtactgtttgctgggatccaccagaagatgatggtggctgtgaaatccaaaattatattctagaaaaatgtgagacaaagcgaatggtttggtctacctattctgctactgtcttgacacctggtactacagtaacacgtctcatagaaggaaatgaatatattttcagagtccgtgcagaaaataaaataggcacagggcctccaacagaaagtaaaccagtcatagccaaaaccaagtatgataaacctggtcgccctgatcccccagaagtcactaaagtaagcaaagaagagatgactgtggtttggaatccacctgaatatgatggtggaaagtctataactggatactttttggagaaaaaggaaaagcattcaacacgatgggtccctgtcaacaagagtgcaatccctgagagacgtatgaaagtacagaatctcctcccagaccatgaatatcagttccgtgtcaaggcagaaaatgaaattggaattggagaaccaagcttgccttcaagaccggtggtggcaaaagaccccatagagccacctggtccaccaaccaatttcagagtggttgatacaaccaaacattccataactcttgggtggggaaaaccagtctatgatggtggtgcaccgatcattggatatgttgtggaaatgagaccaaaaatagcagatgcgtctcctgatgaaggctggaaacggtgtaatgctgcagcacagcttgtacgcaaggaattcactgttaccagcttggatgaaaaccaggaatatgagttcagggtgtgtgcccaaaaccaagttggtattgggcgccctgcagagctaaaggaagctatcaaacctaaagaaatactagaacctccggagattgatttggatgccagcatgaggaaactggtcatagtgagagcaggatgccctattcgtctctttgctatagtgagaggacgaccagcccctaaagtcacttggcgaaaagttggcattgataatgtggtcagaaaaggacaagttgatctggttgacactatggccttccttgtcatccccaattctacccgtgatgactcaggaaaatattccttaacacttgtgaacccagcaggagaaaaggctgtattcgtaaatgtcagagtattagacactcctgggcctgtgtctgatttaaaagtttcagatgtcactaaaacatcatgccatgtgtcctgggcccctcctgaaaacgacggtgggagccaagtgacacattatatcgtggagaaacgtgaggcagacagaaagacatggtcgaccgttaccccagaagttaagaaaacaagcttccatgtaaccaatcttgtccctgggaatgagtattacttcagagtaactgctgtcaacgaatatggccctggcgtcccaacagatgtcccaaaaccagtgcttgcatcagatcctctaagtgagccggatcccccaaggaaattagaagtgactgaaatgaccaagaacagtgccaccttagcctggttacctcccctacgtgatggaggtgctaaaatcgatggctacatcactagttacagagaagaagagcagcctgcagatcgctggacagagtactcagtggtaaaagatctgagccttgttgtcactggcctaaaggaaggaaagaaatacaaatttagagtagcggccagaaatgctgttggagtcagtttgccaagagaagctgaaggagtgtatgaagccaaagaacaactgttgccaccaaagatccttatgccagagcaaataactatcaaagctgggaaaaaactccgaattgaagcccatgtgtatggaaagcctcatcccacctgtaaatggaaaaaaggagaagatgaagttgtcacatccagccacctggcagtgcataaagcagacagctcttcaattctgatcataaaagatgtgactaggaaagacagtggttactacagcctcacagcagagaacagttctgggacagacactcagaaaatcaaagttgtagtcatggatgcccccggcccccctcagcctccatttgacatttctgatatagacgctgatgcttgctccctgtcatggcacatccctctggaggacggaggcagtaacatcaccaattatatagtggagaagtgtgatgtaagccgaggtgactgggtcacggctctagcttcagtcacaaaaacttcctgcagggttggaaagctgatcccaggccaggagtacatcttccgggtccgtgctgaaaaccgatttggcatttcagagcctctcacatctccaaagatggttgcgcagttcccatttggtgttcctagtgaaccaaagaatgcacgagtcaccaaagtcaacaaggactgtatttttgttgcttgggacagaccagatagtgatggagggagccccattattggttatctgattgaacgcaaggaaagaaacagtttgctgtgggtgaaagccaatgatactcttgtccggtcaactgaatatccttgtgctggccttgtagaaggtcttgagtattcattcagaatctatgccctaaacaaagctggatccagcccacccagcaaacccacagaatatgtaactgcaagaatgccagttgatcctcctgggaaacctgaggttattgatgtcaccaagagtactgtatctctgatctgggctcgtccaaagcatgatggaggcagtaaaattattggctatttcgtagaagcttgcaaacttcctggtgataaatgggtacggtgcaatactgcacctcaccagattccccaggaagagtacacagctactggcctagaagagaaagctcagtatcaatttagagctattgccaggaccgcggtaaacattagcccaccttctgaaccttctgatccagtgactatcctcgcagaaaatgtccctcccaggatagacctgagtgtggctatgaaatctttgcttactgtgaaagctggaactaatgtctgcttggatgctactgtttttggtaaaccgatgccaacagtttcttggaaaaaagatggcacactgctaaaaccagcagaaggcataaagatggccatgcagcggaatctgtgcaccttggagctattcagcgtgaaccggaaggactcaggagactataccattactgctgaaaattcaagtggttctaaatcagccaccattaagcttaaagtgttagataaaccgggtcctccagcatctgttaaaatcaacaaaatgtattcagatcgtgctatgctttcttgggaaccgcctcttgaagatggaggctcagaaatcaccaactatattgttgacaaacgtgaaacaagcaggcccaactgggctcaagtctctgcaactgtgcctatcaccagctgcagcgtggagaaacttatagagggccatgagtatcagttccgtatttgtgctgaaaataaatatggagtaggcgatccagtcttcactgaaccagcaattgccaaaaacccatatgacccaccaggacgctgtgatcctcctgttattagcaacataaccaaagatcacatgacagtcagctggaagccaccagcagatgatgggggctcacccatcactggctatttgcttgaaaagcgggaaacccaggctgttaactggactaaggtcaacagaaaacctattatagaaagaacattaaaagcaacaggtcttcaagaaggtaccgaatatgagttccgtgttacagctataaataaagctggaccaggcaaacccagtgacgcatccaaggccgcttatgctcgggaccctcagtatcctcctggcccaccggctttccctaaagtatatgatacaactcgcagctctgtgagtctatcttggggcaagccagcctatgacggcggcagccctatcattggttatctcgttgaagtaaaacgggctgactccgataactgggtgaggtgcaacttaccacagaatctacagaaaacccgctttgaggttactggcctgatggaagacacacaatatcaattccgtgtgtatgccgttaataagattggatacagtgaccccagtgatgtgccagataaacactatcccaaggacatcttaattccacctgagggagaacttgatgcggacttaaggaagacactcatattacgtgctggagttactatgagactatatgtaccagtaaaaggacgcccacctccaaagattacttggtctaaaccaaatgtcaatctaagagacaggattggactggacataaagtcaactgactttgacactttcttgcgctgtgaaaatgtgaacaaatatgatgcaggaaaatatatcttaaccctggagaacagctgtggtaaaaaggaatataccattgttgtgaaagtgcttgatactcctgggccacctgtcaatgtgactgttaaggaaatatccaaagactctgcttatgttacctgggagcctcccattattgatggcggaagccccatcataaactatgtggtacaaaaacgtgatgcagagaggaaatcctggtctacagtgacaactgagtgctccaaaacaagcttcagagtacctaatttggaggagggaaaatcctacttcttccgagtgtttgctgaaaatgagtatggcattggtgatcccggtgaaactcgtgatgctgtcaaagcttcccaaactcctggaccagttgtggacctgaaagtgaggtctgtatctaagtcatcctgtagcattggctggaaaaagcctcacagtgatggtggaagtcggattattggatatgtagttgatttcctgactgaagaaaataagtggcaacgagttatgaaatccttaagcctacagtactctgcaaaagatttgactgaagggaaggaatataccttcagagtgagtgctgagaatgaaaatggagaaggaaccccaagcgaaatcactgttgtggcaagggatgatgttgtggctcctgatcttgacttaaagggtctacctgatttgtgctacttggctaaagaaaacagcaacttccggcttaagatccccataaaaggcaagccagctccatcagtctcctggaagaaaggggaagatcctctagcaactgacactagagtcagtgttgagtcatctgcggttaacacaactcttatagtgtacgattgccaaaaatctgatgctggaaaatacacaatcacacttaagaatgttgctggcaccaaggaaggaactatctccataaaggttgttggcaagcctggcatccccactggaccaatcaaatttgatgaagtcacagcagaagccatgaccttaaagtgggctcctccaaaggatgatggaggttctgaaatcaccaactatatcctagagaagagggattctgtgaacaacaagtgggtgacgtgcgcctcagctgtccagaaaaccacctttagagtaaccagacttcatgagggcatggaatataccttcagggtcagtgccgaaaataaatatggtgtaggggaaggcctgaaatcggagccaattgttgcgagacatccatttgatgtgcctgatgctcccccacctcccaatattgtggatgtcagacacgattcagtatctctaacttggactgaccccaagaaaactggtggttctccaattacagggtatcatctcgagttcaaggaaagaaacagccttttgtggaagagagctaacaagactccgataaggatgagagactttaaagtgacaggattaactgaaggtcttgaatatgaattccgagttatggcaatcaatttagcaggtgtgggcaagccaagcctaccatcagagcctgttgtggcactggacccaattgatcctcctggaaaacctgaggttattaacataacaaggaattcagtgactctcatttggactgaacctaaatatgacggtggtcataagttaactggatatatagtggagaagcgagatctaccttcgaagtcttggatgaaagccaaccatgttaatgtcccagaatgtgcctttactgtaactgaccttgttgagggtggaaaatatgaattcagaattagagcaaagaatacagcaggtgctatcagtgctccatcagaaagtacagaaaccattatttgcaaggatgaatacgaggcaccaacaattgtccttgatcccacaataaaagatgggctaacaattaaagcaggggataccattgttttgaatgccattagcattcttggcaaaccccttccaaaatcaagttggtccaaggcaggaaaagacattagaccatcagatatcactcagataacttcaaccccaacatcttccatgcttactatcaagtatgccactagaaaagatgcgggtgaatataccatcactgctaccaatccttttggcacgaaggtggaacatgtgaaggtaacagtccttgatgtacctggtcccccaggtcctgttgaaatcagtaatgtttctgctgaaaaagcaacacttacatggacacctcccttggaagatggcggctcaccaattaagtcctatatacttgaaaagagagaaaccagccgacttttgtggacagtggtttctgaagatattcagtcttgcaggcatgtggcaaccaaacttatccaaggaaatgagtacatcttccgggtctcagctgtaaaccactatggcaaaggagaacctgtacagtctgaacctgtcaaaatggtagacagatttggtccccctggccctcctgaaaaaccagaggtatcaaatgtcactaagaacactgccactgtcagctggaaaaggccagtggatgatggtggcagcgaaattacaggatatcatgtagaaaggagagaaaagaaaagcctgcgatgggtgagagcaataaaaacaccagtttccgatctcaggtgcaaagtaacaggactgcaagaaggaagcacctacgaattccgtgtcagtgcagaaaacagagcaggaattggtccacccagtgaggcttcagattctgttctgatgaaagatgcagcatatcctccaggaccaccttcaaatccgcatgtcactgatactaccaagaaatctgcttctttggcatggggcaagcctcattatgatggtggacttgaaatcactggctatgtcgtggagcatcaaaaagtaggagacgaggcctggataaaagataccacaggaaccgccctcagaatcactcagttcgttgttcctgatcttcagactaaagaaaaatacaacttcagaatcagtgccatcaacgatgcaggtgttggggagccagcggtgattccagatgttgaaatcgtagaacgggagatggctcctgattttgaactagatgccgagcttcgaagaacacttgttgttagagcaggactcagtattaggatatttgtgccaattaaaggtcgtcctgctcctgaagtgacatggaccaaagataacatcaacctgaaaaaccgagccaacattgaaaatacggaatcatttactcttctgattatcccagaatgtaacagatatgataccggtaaatttgtcatgaccattgaaaacccggctgggaagaaaagtggctttgtgaacgtcagagtcttggacacgccaggcccagtcctcaacctgcggcctacagacatcacaaaggacagtgtcaccctgcactgggacctccctctgatagatggaggctcacgtataacaaactacattgtagagaaacgtgaagcaacacggaaatcttattccacagccaccactaagtgccataaatgcacatataaagttaccggcttgtctgaagggtgtgaatatttcttcagagtgatggcagagaatgaatatggaattggtgagccaacagaaactacagagcccgtaaaagcctctgaagcaccatctccaccagacagccttaacatcatggacataactaagagcaccgtcagcctggcatggcctaagcccaaacacgatggtggcagcaagatcactggctatgtgattgaagcccaaagaaaaggctctgaccagtggacccacatcacaaccgtgaaagggttagaatgtgttgtgaggaatctaactgaaggagaggaatataccttccaagtgatggcagtgaacagcgcggggagaagtgcccctagagaaagcagacccgtcattgtcaaggagcagacaatgcttccagagctggatctccgtggcatctatcagaaactggtcattgccaaagctggtgacaacatcaaagttgaaattccagtgctcggtcgaccgaagcccacagtgacatggaaaaaaggagaccaaattcttaaacagacacagagagttaattttgaaaccacagcgacttcaaccattttaaatatcaatgagtgtgtcagaagtgatagtgggccctatccattaacagcaaggaacattgtaggagaggttggtgatgtcatcaccattcaagtccatgatatcccagggccacctactggaccaatcaaatttgatgaagtttcatctgattttgtaaccttctcttgggacccacctgagaacgatggtggtgtaccaataagcaactatgtagtggaaatgcggcagactgacagtactacctgggttgagttagcaaccaccgttatacgtactacctataaagccacccgccttactactggattagagtatcagttccgtgtaaaagctcagaatagatatggagttggaccaggcatcacatcagcatgcatagttgccaactatccatttaaggttcctggacctcctggtacccctcaggtaactgcagttaccaaggattcaatgacaattagctggcatgagccactttctgatggtggaagccccattttaggatatcatgttgaaagaaaagaacgaaatggtattctctggcagactgtgagcaaagctttagtaccaggcaacattttcaaatcaagtggacttacagatggtattgcttatgagttccgggtgattgcagaaaacatggcaggcaaaagtaagccaagcaagccatcagaacctatgttggctctggatcccattgacccacctggaaaaccagtacctctaaatattacaagacacacagtaacacttaaatgggctaagcctgaatatactgggggctttaaaattaccagttatatcgttgaaaagagagaccttcctaatggacggtggctgaaggccaacttcagcaacattttggagaatgaatttacagtcagtggcctaacagaagatgctgcatatgaattccgtgtgatcgccaaaaatgctgcaggtgccatcagtccaccatctgagccatctgatgctatcacttgcagggatgatgttgaggcaccaaagataaaggtggatgttaaatttaaggacacggttatattaaaagcaggtgaagcattcagactggaagctgatgtttcaggccgcccacctccaacaatggaatggagcaaagatggaaaagagctggaaggcacagcaaagttagaaataaaaattgcagatttctctactaatctggtaaacaaagattcaacaagaagggatagtggtgcctatacccttacagcgactaatcctggtggctttgctaaacacattttcaatgtcaaagttcttgacagaccaggcccacctgaaggacctttggctgtaactgaagtgacatcagaaaagtgtgtactatcatggttccctccactggatgatggaggtgccaaaattgatcattacatagtacagaaacgtgaaaccagcagattggcatggacaaatgtagcctcagaagtccaagtaacaaagctaaaggtcactaaactcttgaaaggcaatgaatacatattccgtgtcatggctgtaaataaatatggagtgggagagccactggaatcagagcctgtgcttgcagtgaatccttatggaccccctgatccgcccaaaaaccctgaagtgacaactattactaaagattcgatggttgtctgctggggacatcctgattctgatggtggaagtgaaatcatcaattatattgtggaacggcgtgataaagctggccaacgctggattaaatgcaacaaaaaaactcttactgatttaagatataaagtgtctggactgacagaaggacatgaatatgagttcaggattatggctgaaaatgctgctggaattagtgcaccaagtcctaccagtccattttacaaggcttgtgacactgtgtttaaacctggaccaccaggtaacccacgtgttctggatacaagcagatcatccatttcaatcgcttggaataaacctatctatgatggtggttcagaaatcactgggtatatggttgagattgccctgccagaggaagatgaatggcagattgtcactccaccagcaggactcaaggcaacttcgtatactatcactggcctcacagagaatcaggaatataagatccgcatctatgccatgaattccgaaggacttggggaacctgcccttgttcctggaactccaaaggctgaagacagaatgctgcctccagaaattgaactggatgctgacctgcgcaaagttgttactataagggcctgctgcaccctgagactttttgttcccatcaaaggaaggcctgcacctgaggtgaagtgggcccgggaccatggagaatctttagataaagctagcatcgaatccacaagctcttacaccctgcttattgttggaaatgtaaacagatttgacagtggcaaatatatactaactgtagaaaatagttcaggcagcaagtctgcatttgtcaatgttagagttctcgatacaccaggccccccacaggatctgaaggtaaaagaggtcactaagacatctgtcacactcacatgggacccacctctccttgatggaggttcaaaaatcaagaactatattgttgaaaagcgggaatcaacaagaaaagcatattcaactgttgcaacaaactgccacaagacttcctggaaggtagaccagcttcaagaaggctgtagctactatttcagggttctcgcagaaaatgaatatggcattgggctgcctgctgaaaccgcagaatctgtgaaagcatcagaacgacctcttcctccaggaaaaataactttgatggatgtcacaagaaatagtgtgtcactctcttgggagaaaccagagcatgatggaggcagccgaattctaggctacattgtggagatgcagaccaaaggcagtgacaaatgggccacgtgtgccacagtcaaggtcactgaagccactatcactggattaattcagggtgaagaatactctttccgtgtttcagctcagaatgaaaagggcatcagtgatcctagacaactgagtgtgccagtgatcgccaaagatcttgtcattccaccagccttcaaactcctgttcaatactttcactgtactggcaggtgaagacctaaaagttgatgttccattcattggccgccctaccccagctgtaacctggcataaagataatgtaccactgaagcagacaactagagtaaatgcagagagcacagaaaataattcactactgacaataaaggacgcctgccgagaagatgttggccattatgtggttaaactgactaactcagctggtgaagctattgaaacccttaatgttatcgttcttgacaaaccagggcctccaactggaccagttaaaatggatgaagtgacagctgatagtattactctttcctggggcccacccaagtatgatggtggaagttctatcaataattacattgttgagaaacgggacacttccacaaccacctggcaaattgtatcagctacagttgcaaggacaacaataaaggcttgcagactgaagactggatgtgaatatcagtttagaattgcagctgaaaacagatatgggaagagtacctacctcaattcagagcctactgtagcccaatatccattcaaagttcctggtcctcctggcactccagttgtcacactgtcctccagggacagcatggaagtacaatggaatgagccaatcagtgatggaggaagtagagtcattggctatcatctagaacgcaaggaaagaaatagcatcctctgggttaagttgaataaaacacctattcctcaaaccaagtttaagacaactggccttgaagaaggtgttgaatatgaatttagagtctctgcagagaacatcgtgggcattggcaagccgagtaaagtatcagaatgttatgtggctcgtgacccatgtgatccaccaggacggccagaggcaatcattgtcacaaggaattctgtgactcttcagtggaagaaacccacctatgacggtggaagcaagatcactggttatattgttgagaagaaagaattacctgagggccgttggatgaaagccagttttacaaatattattgacactcattttgaagtaactggcctagttgaagatcacagatatgagttccgggttatagcccgaaatgccgcaggagtgtttagtgagccttcagaaagcacaggagcaataacagctagagatgaggtagatccaccacgaataagtatggatccaaaatacaaagacacaatcgtggttcatgctggtgaatcattcaaggttgatgcagatatttatggcaaaccaataccaaccattcagtggataaaaggtgatcaggagctttcaaacacagctcgattagaaataaagagcaccgactttgccaccagtctcagtgtaaaagatgcagtacgtgtcgacagtggaaattacatactgaaggccaaaaatgttgcaggagaaagatcagttactgtgaatgtcaaggttcttgacagaccagggccacctgaaggacctgttgttatctcaggagttacagcagaaaaatgcacactagcttggaaacccccacttcaggatggtgggagtgacatcataaattatattgtggaaaggagagaaaccagccgcttagtttggactgtggttgatgccaatgtgcagactctcagctgcaaggttactaagcttcttgaaggcaatgaatatactttccgtataatggcagtaaacaaatatggtgttggtgaacctcttgaatctgagccagtagttgccaagaatccatttgtagtaccagatgcaccaaaagctccagaagtcacaacagtgaccaaggactcaatgattgttgtatgggaaagaccagcatctgatggtggtagtgaaattcttggatatgttcttgagaaacgggataaagaaggcattagatggacaagatgccataagcgtctgattggagagttgcgcctgagagtaactggactcatagaaaatcacgattatgagttcagagtttctgctgagaatgctgctggacttagtgaaccaagccctccttctgcttaccaaaaggcttgtgatcctatttataaaccaggacccccaaacaaccccaaagtcatagacataaccagatcttcagtattcctttcttggagcaaaccaatatatgatggtggctgtgaaattcaaggatacattgttgaaaaatgtgatgtgagtgttggtgaatggacaatgtgcactccaccaacaggaattaataaaacaaacatagaagtagagaagctgttggaaaagcatgaatacaacttccgtatctgtgctattaataaagctggagttggagaacatgctgacgtccctggacctattatagttgaagaaaaattagaagcaccagacattgatcttgacctagaactaaggaaaatcataaatataagggcaggtggctccttaaggttatttgttcctataaaaggtcgtcctacaccagaagttaaatggggaaaggtggatggtgaaatccgagatgcagctataattgatgtcactagcagtttcacctctcttgttcttgacaatgtcaaccgatatgatagtggaaaatatacgcttacattagaaaacagcagtggaacaaagtctgcctttgttactgtgagagttctggacacgccaagtccacctgttaacctgaaagtcacagaaatcaccaaagactcagtatcaattacatgggaacctcctttgttggatgggggatccaaaataaaaaattacattgttgagaaacgtgaagccacaagaaaatcatatgctgctgttgtaactaactgccataagaattcttggaaaatcgatcagctccaagaaggttgcagttattactttagagtcacagctgagaatgagtatggtattggccttcctgcccagactgctgatccaattaaggttgcagaagtgccacaacctcctggaaaaataactgtggatgatgtcaccagaaacagtgtctctctgagttggacaaaacctgaacatgatggtggcagtaaaatcattcagtatattgtggaaatgcaagctaaacacagtgagaaatggtcagagtgtgctcgagtaaagtctcttcaggcagtaattaccaacctaactcaaggggaagaatatctttttagagttgttgctgtaaatgaaaaggggagaagtgatcctcggtcccttgcagttccaatagttgccaaagatctggtaattgagccagatgtaaaacctgcattcagtagttacagtgtacaggttggccaagatttgaaaatagaagtgccaatttctggacgtcctaagccaaccattacctggactaaagatggtctcccactgaagcagaccacaagaatcaatgttaccgattcactggatctcaccacactcagtattaaagaaactcataaggatgatggtggacaatatggaatcacagttgccaatgttgttggtcagaagacagcatccatcgaaattgtaactctagataaacctgatcctccaaaaggacctgttaaatttgatgacgtcagtgctgaaagtattacattatcttggaaccctccattatatacagggggctgccaaatcaccaactacattgttcagaaaagagatacaaccaccacagtatgggatgttgtttctgctactgttgctagaactacactcaaagtgaccaaactgaaaactggtacagaataccaatttagaatatttgccgaaaacagatatggacaaagctttgccttagagtctgatccaattgtagctcaatatccctacaaagaaccaggccctccaggtacaccatttgccacagccatttccaaagactccatggtcatacagtggcatgaaccagtcaacaatggtggaagccccgtcataggttaccacctggagagaaaagaaagaaacagtattttgtggacaaaggtcaacaaaactattattcatgacacccaattcaaagcacagaatcttgaagaaggcattgaatatgaattcagagtgtatgctgaaaatattgttggtgtaggcaaagcaagcaagaattctgaatgctatgtagccagagatccctgtgacccaccaggaaccccagaaccaataatggttaaaagaaatgaaatcactttacagtggaccaaacctgtgtatgatggtggaagtatgattacaggctacattgtagagaaacgtgatttgcctgatggtcgttggatgaaagctagctttacaaatgtcattgaaactcaatttactgtgtcaggtcttactgaagatcaaagatatgaattcagagtcattgcaaagaatgcagctggtgcaataagtaaaccctctgacagtactggaccaataactgccaaggatgaggttgaactcccaagaatttcaatggatccaaaattcagagacacaattgtggtaaatgctggagaaacattcagacttgaggctgatgtccatggaaagcccctacctaccattgagtggttaagaggagataaggaaattgaagaatctgctagatgtgaaataaagaacacagatttcaaggctttacttattgtaaaagatgcaattagaattgatggtgggcagtatattttaagagcttccaatgttgcaggttctaagtcattcccagtaaatgtaaaagtattagatagaccaggacctccagaagggccagtccaggttactggagtcacttctgaaaaatgctctttaacatggtctccaccacttcaagatggtggcagtgacatttctcactatgttgttgaaaagcgagaaaccagtcgacttgcctggactgttgttgcttcagaagttgtgaccaattctctgaaagttaccaaactcttagaaggtaatgaatatgttttccgtataatggctgtcaacaaatatggtgttggagagcctttggaatctgcaccagtactaatgaaaaatccatttgtgcttcctggaccaccaaaaagcttggaagtcacaaatattgccaaagactccatgaccgtctgttggaaccgtccagatagtgatggtggaagtgagattattggttacattgtagagaaaagagacagaagtggcattcgatggataaaatgtaataaacgccgcattacagatttgcgtctaagagtgacaggattaacagaagatcatgagtatgaattcagggtctctgcagaaaatgctgctggagttggggaaccaagtccagctacagtttattataaagcctgtgatcctgtgttcaaacctggcccacctaccaatgcacacattgtagacaccactaaaaattcaatcacacttgcctggggtaaacccatctatgatggcggcagtgagatcttgggatatgtagtagaaatctgtaaagcagatgaagaagaatggcaaatagttactccacagactggcctgagagtcactcgatttgaaatttcaaaactcactgaacaccaagagtataaaatacgagtctgtgccctcaacaaagttggtttaggtgaggctacatcagttcctggtactgtgaaaccagaagataaacttgaagcacctgaacttgaccttgactccgaattaagaaaaggaattgttgtaagagctggtggatctgccagaattcacattccattcaaaggtcgtccaacgcctgagatcacttggtctcgagaggaaggtgaattcacagataaggtccaaattgaaaagggagtaaactatacccaactatcaatagataactgtgatagaaatgatgctggaaaatacattcttaagttggaaaacagcagtggatcaaagtctgcttttgtaactgtgaaagttcttgacactccaggaccaccacagaatttggcagtcaaagaagtgagaaaagattctgccttcctggtatgggagccacccatcattgatggaggggcaaaggtcaagaactatgtgattgacaaacgtgagtcaaccagaaaagcgtatgctaatgtgagtagtaaatgcagcaaaacaagttttaaagtggaaaaccttacagaaggagccatttattacttcagagtcatggctgaaaatgaatttggagttggtgttccagtggaaactgttgatgccgtgaaagctgctgaacctccttccccaccaggaaaggttacactcactgatgtgtcccagaccagtgcatcacttatgtgggagaaacctgaacatgatggcggtagcagagtcctggggtacgttgttgaaatgcagcccaaaggaactgaaaaatggagcattgtggctgaatccaaagtctgtaatgcagttgttactggtttgagttctggacaagaatatcagttccgtgtcaaggcttataatgagaaaggaaaaagcgatccaagagtgttgggtgttcctgtcatagccaaggacttgactatacagcctagtttaaagttaccatttaacacatatagtatccaagctggagaagatcttaaaatagaaattccagttataggccgaccaagacctaacatttcttgggtcaaagatggtgagcctcttaaacagacaacaagagtaaacgttgaagaaacagctacctcaactgttttgcacattaaagaaggtaacaaagatgactttggaaaatacaccgtaacggcaacaaatagtgcaggcacagcaacagaaaatctcagtgttatcgttttagaaaagcctggacctccagttggcccagttcggtttgatgaagttagtgcagactttgtagtcatatcttgggaacctccagcctatactggtggctgccaaataagcaactacattgtagagaagcgagatacaaccaccaccacttggcacatggtatcagcaacagttgcaagaacaacaattaaaataaccaaactgaaaacaggcacggagtaccagtttagaatttttgctgaaaacaggtatggaaaaagtgccccactggattctaaggcagttattgtacaatatccatttaaagaacctggaccacctggaactccttttgtgacatcaatctcaaaagatcagatgcttgtgcaatggcatgagccagtgaatgatggaggcaccaaaattattggctaccatcttgaacagaaagaaaagaacagtattttatgggtcaagttaaataagacccccattcaggacaccaaattcaaaacaactgggcttgatgagggccttgagtatgagttcaaagtttctgctgaaaatattgttggcattggcaagcctagcaaagtgtcagaatgctttgttgctcgtgatccatgtgacccacctggtcgccctgaagccattgttattacaagaaacaatgtcacactgaaatggaagaaacctgcctatgatggtggtagcaaaataacaggttatattgtagaaaagaaagatctacctgatggccgctggatgaaagccagctttaccaacgtattagaaactgaatttacagtgagtggacttgtagaagaccaaagatatgaatttagagtaattgcaagaaatgcagctggaaactttagtgaaccatctgatagtagtggtgccattactgcaagagatgaaattgatgcaccaaatgcctctctggatccaaaatataaagatgtcatcgttgttcatgcaggagagacttttgttcttgaagccgacatccgtggcaaacctatacctgatgttgtttggtcaaaagatggaaaagaacttgaagaaacagctgctagaatggaaattaaatctactattcagaaaacaactcttgttgtcaaagactgtatacggactgatggaggacaatatattctgaaactcagcaatgttggtggtacaaagtctatacccatcactgtaaaggtacttgacaggccagggcctcctgaagggcctctgaaagttactggagttactgcggaaaaatgttacctggcatggaacccacctttgcaagatggtggtgctaatatttcacattacatcattgaaaagagggagacaagccgactctcttggacccaggtttcaactgaggtacaggcccttaactacaaagttactaaacttcttcctggtaatgagtacattttccgtgtcatggctgtgaataaatatggaattggagagcccttggaatctgggcctgttacggcctgtaatccttataagccaccaggtcctccctcaacacctgaagtctcagcaatcaccaaagattctatggtagtaacatgggcacgcccagtagacgacggaggtaccgaaattgagggctacattcttgaaaaacgagataaggaaggcgttagatggaccaagtgcaacaagaaaacattaacggatctgcggctcagggtaactggtcttaccgaaggccattcctatgaattcagagttgctgctgaaaatgcagctggtgtgggagaacctagtgagccatctgttttctaccgtgcgtgtgatgccttgtatccaccaggtcccccaagcaatccaaaagtgacggacacttccagatcttctgtctccctggcatggagtaagccaatttatgatggtggcgcacctgttaaaggctatgttgtagaggtcaaagaagctgctgcggatgaatggacaacctgcactccaccaacaggattacaaggaaagcagttcacagtgaccaagcttaaagaaaacactgaatataacttccgtatttgtgccatcaattctgaaggtgtaggtgaacctgcaactctacctggctcagtggttgctcaggagaggatagagccaccagaaatagaactcgatgctgatctcagaaaggtggtcgttctgcgtgcaagtgctactttacgcttatttgtcactatcaaaggtcgaccagaacccgaagttaaatgggaaaaggcagaaggcattctcactgacagggctcagatagaggtgaccagctcatttacaatgttggtgattgataatgttaccagatttgacagtggtcggtataatctgacattagaaaataatagtggctccaaaacagcttttgttaacgtcagagttcttgactcaccaagtgcccctgtgaatttgaccataagagaagtgaagaaagactcagtgacgttgtcctgggaaccaccacttattgatggtggagctaagattacaaactacattgtcgaaaaacgagaaactacaagaaaagcctatgctaccattacaaataattgcactaaaactactttcagaattgaaaatctacaagaaggatgttcttactacttccgagtcttggcttccaatgaatatgggattggtttgccagctgaaacaacagaacccgttaaagtgtctgaaccacccctcccacctggaagagtaactcttgttgatgtgacccgtaatacagctacaattaagtgggagaaaccagaaagtgatggtggcagcaaaattactggttatgtggttgaaatgcagactaaagggagtgaaaagtggagcacctgcacacaagttaagactctagaagcaactatatctggcttaactgcaggagaagagtatgtcttcagggtagctgcagttaacgaaaagggaagaagtgatccaagacaacttggagtgccagtaattgcaagggatattgaaataaagccttcagttgagcttcctttccatactttcaatgtaaaggctagagaacaacttaagattgatgtgccattcaaaggaagacctcaagctactgtgaactggagaaaagatggtcagactcttaaagagacaactagagtcaatgtttcttcttcaaagactgtaacatcactatctattaaggaagcttcaaaggaagatgttggaacttatgaattatgtgtttcaaacagtgctggatccataacagttcctattactataattgtccttgacagaccaggacctccaggtcctatacgtattgatgaggttagttgtgacagcataaccatttcttggaatcctccagaatatgatggtggctgccaaattagcaattacattgttgaaaagaaagaaaccacctctacaacatggcacatagtttcacaagcagttgcaagaacatccattaaaatagttcgcctgacaacaggaagtgagtatcagttccgtgtttgtgcagaaaaccgctatggaaagagctcctacagtgaatcttcagctgttgttgcagagtatccattcagtcccccaggtcctcctggtactcctaaagttgtgcatgccacaaaatctaccatgcttgtaacctggcaagtgccagttaatgatggaggaagtcgagtaattggctatcatcttgagtataaagaaagaagcagcattctttggtcaaaagcaaataaaatcctcattgctgatactcaaatgaaagtctccggccttgatgaaggactgatgtatgagtatcgtgtatatgctgaaaatattgctggaattggtaaatgcagtaaatcttgtgaaccagtccctgcaagagatccttgtgaccctcctggacaacctgaagtcacaaatatcacaagaaaatcagtgtcacttaaatggtctaaaccacattatgatggtggagctaagatcacaggatacattgttgaacgcagagaactaccagatggccggtggctgaagtgcaattatactaatatacaagaaacatactttgaagtaactgaacttactgaagatcagcgttatgaattccgggtttttgcaaggaatgctgctgactcagttagtgagccatctgaatccactgggcctattatagttaaagatgatgttgagcctccaagagttatgatggatgtcaagttccgagacgttattgttgtcaaagctggagaggtccttaagataaatgcagacattgcagggcgacctctgccagtaatttcctgggccaaggatggtatagaaattgaagaaagagcaagaacagaaatcatctcaacagacaatcatactttgttaacagttaaagactgtataagacgagacactgggcaatatgtactaacactgaagaatgttgccggcactcggtctgtggccgttaattgcaaagtacttgataagcctggtccaccagcaggaccacttgaaataaatggcctcactgctgagaaatgctctctttcctggggacgtccccaagaagatggtggtgcagatatcgactattacatcgtagaaaaacgtgaaacaagccaccttgcatggacaatatgtgaaggagagttacagatgacatcctgtaaagtaaccaagttactcaaaggcaatgaatatatatttagagtaactggtgttaataaatatggtgttggtgagcccctagagagtgtagctataaaggcactagatccatttacagttccaagtccacccacgtctttggaaattacttctgtgaccaaagaatctatgacactttgctggtcaagacccgagagtgatggaggtagtgaaatatctggatatataattgaaaggcgagagaaaaatagcctaagatgggtgcgtgtaaacaaaaaaccagtttatgatctaagagtgaaatcaacaggacttcgggaaggatgtgaatatgaatatcgtgtttatgcagaaaatgctgctggcctaagtcttccaagtgaaacctctcccttaattagggcagaagatccagtgttcctaccatctcctccatccaaacccaaaattgtggactcaggcaagacaactataactattgcctgggttaagccgctgtttgatggtggggccccgataactggatatactgtagaatacaaaaaatctgatgacactgactggaaaacttccattcagagcttacgagggacagaatatacaataagcggactaacaacaggagctgaatatgttttcagagtaaaatctgtcaataaggttggtgctagtgaccccagtgatagctctgaccctcagatagcaaaggaaagagaagaagaacctttatttgatattgacagtgaaatgaggaagaccttgattgtcaaggctggtgcctcatttaccatgactgtgcctttccgaggaagaccagtacccaatgtcttgtggagtaagccagacactgacctccgtactagagcttatgttgataccacagactctcgtacatcactgaccattgaaaatgccaacagaaatgactctggaaagtacacattaacaattcagaatgttttgagtgctgcttcactgaccttagttgtcaaagttttagataccccaggtcctccaaccaacattactgtgcaagatgtaaccaaagagtctgcagtgttatcctgggatgttcctgaaaacgatggtggagcaccagtgaagaattaccacatagaaaaacgtgaggccagcaagaaagcatgggtctctgtgaccaacaactgtaaccgcctctcctacaaagttaccaatttacaagaaggagctatctattacttcagagtctctggagaaaatgagtttggtgttggtataccagctgaaacaaaggaaggagtaaaaataacagaaaaaccaagcccacctgaaaaacttggagtaacaagtatatccaaagacagtgtttccctgacctggctgaagcctgaacatgatggcggaagcagaattgtacactatgtcgttgaagcactagaaaaaggacagaaaaactgggttaaatgtgcagtggcaaagtcaacccatcacgttgtttccggtctgagagagaattctgaatactttttccgagtgtttgctgaaaatcaagctggcctgagtgacccgagagagcttctgcttcctgttcttattaaggagcaactagaaccacctgaaattgatatgaagaatttcccaagtcacactgtatatgttagagctggttcaaaccttaaagttgacattccaatctctggaaaaccacttcccaaagtgaccttatcaagagatggtgtcccccttaaggcaaccatgagatttaataccgaaattactgctgagaacctgaccatcaatctcaaagaaagtgttacagctgacgctgggagatatgaaatcactgctgccaactccagtggtacaaccaaagctttcattaacattgttgtgctagacaggcctggtcctccaactggccctgttgttattagtgatataactgaagaaagtgtgactctcaaatgggagccacctaagtatgacggtggaagtcaagttaccaactacattctactcaaaagagaaacaagtactgcagtgtggactgaagtgtctgcaacagttgcaagaaccatgatgaaagtcatgaaactgaccacaggagaagaataccaattccgcatcaaggcagaaaaccgctttggcatcagtgatcatatagattcagcttgtgtgactgtcaaactaccatacacaacacctggaccaccatctacaccatgggtcactaatgttactcgagaaagcatcactgtgggctggcatgaaccagtgtcaaatggaggcagtgcagtcgtaggctatcacctggaaatgaaagacagaaacagtattttatggcaaaaagccaacaaactggtcatccgcacaactcacttcaaagtcacaacaatcagtgctggacttatttatgaattcagggtgtatgcagaaaatgctgctggagttggaaaacctagccatccttctgaaccagtcttggcaattgatgcttgtgaacccccaagaaatgttcgtatcactgatatttcaaagaactctgtcagcctttcatggcaacaaccagctttcgatggaggtagcaagattacaggctacattgttgagagacgtgaccttccagatggcagatggaccaaggccagcttcaccaatgttactgaaactcaattcatcatctctggcttgactcagaattcccagtatgaattccgtgtctttgctaggaatgctgttggttccattagcaatccatctgaggttgtagggcccattacttgcatcgattcttatggtggtcctgtaattgatttgcctctagaatatacagaagttgtcaaatacagagcaggtacatctgtgaagctcagagctggcatttctggcaaacctgcgcctactattgagtggtataaagatgataaagaattacaaaccaatgcactggtgtgtgttgaaaataccacggacctcgcatctatactcatcaaagatgccgatcgccttaatagtggatgctatgaattaaaactaaggaatgccatgggctcagcctcagccaccatcagagtacagatccttgacaaaccaggcccacctggtggaccaattgaatttaagactgtaactgctgagaagatcacccttctctggcggcctccagctgatgatggtggtgcaaaaatcactcactacattgtggaaaagcgtgagacaagccgcgttgtgtggtctatggtgtctgaacatttggaagagtgcatcattacaaccaccaaaattatcaaaggaaatgaatacatcttccgggtccgagccgtgaacaaatatggaattggcgagccactggaatctgattccgttgtagccaagaacgcatttgttacacctgggccaccaggcataccagaagtgacaaagattaccaagaattcgatgactgttgtatggagcaggccaattgcagatggcggtagtgatataagtggctatttccttgaaaaacgagacaagaagagcctaggatggtttaaagtactaaaagagactatccgtgacaccagacaaaaagtaacaggactcacagaaaacagtgactatcaatacagagtttgtgctgtaaacgctgctggacagggtccattttctgaaccatctgaattctacaaagctgctgatcctattgatcctccaggtccacctgctaagataagaatcgcagattcaaccaagtcatccatcacccttggctggagtaagcctgtctatgatgggggcagtgctgttactgggtatgttgtcgagataagacaaggagaggaagaggaatggactactgtctctaccaaaggagaggtcagaactacagaatatgtggtatccaacctgaaacctggagtcaattactacttccgggtatctgctgtaaactgtgctggacaaggagaacctatagaaatgaatgaacctgtacaagctaaagatatacttgaggcaccagagattgacctggatgtggctctcagaacttctgttattgccaaagctggtgaagatgtacaagtgttgattccctttaaaggcagacctccacctactgtcacatggagaaaagatgagaagaatcttggcagtgatgccagatacagcattgaaaacactgattcatcctcattactcaccattcctcaagttactcgcaatgatacaggaaaatatattctcacaatagaaaatggagttggtgaacctaagtcttcaactgtgagtgttaaagtgcttgacacaccagctgcctgccagaaactacaggttaaacatgtttctcgaggcacagtcactttgctctgggatcctcctctcattgatggaggatctccaataattaattatgtcattgaaaagagagatgccaccaagagaacatggtctgtcgtgtcacacaaatgttctagcacatccttcaagctaatagatttgtcggagaagactccattcttcttcagagttcttgcagaaaatgaaattggaattggggaaccctgtgaaactacagagccagtgaaggctgctgaagtaccagctcctatacgtgatctctcaatgaaagactcaacaaagacatctgtcatcctcagctggaccaaacctgactttgatggtggtagcgtcatcacagaatatgttgtagaaaggaaaggtaaaggtgaacagacgtggtcccacgctggcataagtaagacatgtgaaattgaggttagccaacttaaggagcagtcagtcctggagttcagagtgtttgccaaaaatgagaaaggactgagtgatcctgtcactattgggccaattacagtgaaagaacttattattacacctgaagttgacctgtcagatatccctggggcacaagtcactgtgagaattgggcacaatgtgcaccttgaattaccttataagggaaaacccaaaccatccatcagttggctgaaagatggcttgccactgaaagaaagtgaatttgttcgcttcagtaaaactgaaaacaaaattactttgagtattaagaatgccaagaaggagcatggaggaaaatacactgttattcttgataatgcagtgtgtagaattgcagtccccattacagtcatcacccttggcccaccatcaaagcccaaaggacccattcgatttgatgaaatcaaggctgatagtgtcatcctgtcatgggatgtacctgaagataatggaggaggagaaattacttgttacagcatcgagaagcgggaaacttcacaaactaactggaagatggtgtgttcaagtgttgccagaacgactttcaaagttcctaatctagtcaaagatgctgagtaccagtttagagtgagagcagaaaacagatacggagtcagccaaccacttgtctcaagcattattgtggcaaaacaccagttcaggattcctggtcccccaggaaagccagttatatacaatgtgacttctgatggcatgtcactaacttgggatgctccagtttatgatggtggttcagaagttactggattccatgttgaaaagaaagaaagaaatagcatcctctggcaaaaagttaatacatcaccaatctctggaagagaatatagagccactggactggtagaaggtctggattaccaattccgtgtatatgctgaaaattctgctggcctaagctcacctagtgacccaagcaaatttaccttagctgtttctccagtagacccacctggcactcctgactacattgatgtcacccgggaaaccatcacacttaaatggaacccaccattgcgtgatggaggcagtaagattgtgggctatagcattgagaaacggcaaggaaatgaacgctgggtgagatgcaactttactgacgtcagtgaatgtcagtacacagttacaggactcagtcctggggatcgctatgagttcagaataattgcaagaaatgctgttggaactataagcccgccctcacagtcttctggcattattatgacaagagatgaaaatgttccaccaatagtagagtttggccctgaatactttgatggtctcattattaagtccggagagagccttagaattaaagctttggtacaaggaagaccagtgcctcgagtaacttggttcaaagatggagtggaaatcgaaaagaggatgaatatggaaataaccgacgtacttggatccaccagcctatttgttagagatgctactcgggaccatcgtggtgtatacacagtggaagccaaaaatgcatctggttctgcaaaagcagaaattaaagtgaaagtacaagatacaccaggaaaagtagttgggccaataagattcaccaatattactggggagaagatgactctgtggtgggatgccccactcaatgacggttgtgctcccataacccactacatcattgaaaaacgggaaaccagcagacttgcctgggcactaattgaggataaatgtgaagcccaaagttacactgccattaaactaataaacggcaatgaataccaattccgtgtttctgcagttaacaagtttggtgttggcaggccacttgattctgatccagtggttgctcaaatacaatatactgttcctgatgcccctggcattccagaacctagcaacataacaggcaacagcattaccctgacatgggcaaggccagaatcagatggtggcagtgaaattcaacagtatatccttgaaagaagagaaaagaaaagcacaagatgggtaaaagtgatcagcaaacgaccaatctctgaaacaagattcaaagtcactggtctgacagaaggcaatgagtatgaattccatgtcatggctgaaaatgctgcaggagttggacctgcaagtggcatctcaagactcattaaatgtagagagcccgtcaacccaccaggtcctcccacagtggtcaaagtaacagacacatcaaagacaactgtgagcttagaatggtccaaaccagtgtttgatggtggcatggaaataattgggtatattattgaaatgtgtaaggccgacttaggagactggcacaaggtgaatgcagaggcatgtgtgaaaacaagatatacagtcactgatctacaagcaggtgaagaatacaaattccgagttagtgctatcaatggtgctggaaaaggcgacagctgtgaagtgactggcacaattaaagcagttgaccggttaacagctcctgagttagacatagatgcaaacttcaaacagactcatgttgttagagctggggccagtattcgcctcttcattgcctaccaaggtagacctactcctacagctgtgtggagcaaaccagactctaaccttagccttcgggctgatatccatacaacagattccttcagcaccctcactgtggaaaactgcaacagaaatgatgcagggaaatatacccttactgtggaaaacaacagtggtagtaagtcaatcacattcaccgtgaaagtgctagacactccaggcccacctggcccaattaccttcaaagatgtgacccggggatctgctacattgatgtgggatgcccctcttcttgacggtggtgcccgaatccatcattatgtggtagagaaacgagaggcaagtcgccgtagttggcaggttatcagtgaaaaatgcactcgtcagatcttcaaggtcaatgacctggccgaaggtgttccgtactatttccgtgtttctgcagtaaatgagtatggtgttggtgagccctatgaaatgccagaaccaattgtagccacagaacagcctgctccacctaggagacttgatgttgttgatactagcaaatcctccgcagtcttagcttggcttaaacctgaccacgatggaggcagccggatcactggctacctgcttgaaatgagacaaaagggatctgacttctgggttgaagctggtcacaccaaacagctaactttcacagtagagcgtcttgttgagaaaactgaatatgaattccgtgtgaaggccaagaatgatgctggctatagtgaacccagagaagccttctcttctgtcatcattaaggagcctcaaatcgagcccactgctgacctcactggaattaccaatcagcttataacttgcaaagcaggaagcccatttaccattgacgtaccaatcagtggtcgtcctgcccccaaagtaacatggaaactggaagaaatgagacttaaagagacagatcgagtgagcattacaacaacaaaagacagaaccacactgactgtaaaggacagcatgagaggtgactctggaagatacttcttgaccctggaaaatacagctggtgttaaaacatttagcgtcacagttgtggtcattggaaggccaggtccagtaaccggccccattgaggtctcatctgtctcagctgaatcgtgtgtcctgtcatggggagaacctaaagatggaggaggcactgaaattactaattacatagttgaaaagcgtgaatcgggtacaacagcttggcagcttgtcaattccagtgtcaagcgcactcaaattaaagtcactcatctcacaaaatacatggaatattctttccgtgtcagttcagagaacagatttggtgtcagcaaacctctagaatcagcaccaataattgctgaacatccatttgtcccaccaagcgctcctaccagacctgaggtctaccatgtgtctgccaatgccatgtctattcgttgggaagaaccctaccacgatggtggcagtaaaatcattggctactgggttgagaagaaagaacgtaatacaattctttgggtgaaagaaaacaaagtgccatgcttagagtgcaactacaaagtaactggtttagtagaaggactggaatatcagttcagaacttatgcactcaatgctgcaggtgttagcaaggccagcgaagcttcaagacctataatggctcaaaatccagttgatgcaccaggcagaccagaggtgacagatgtcacaagatcaacagtatcactgatttggtctgccccagcgtatgatggaggcagcaaggttgtgggctacatcatagagcgtaagccagtcagtgaggtaggagatggtcgctggctgaagtgcaactacaccattgtatctgacaatttcttcaccgtgactgctctcagtgaaggagacacttatgagttccgtgtgttagccaagaatgcagcaggcgtaattagcaaagggtctgaatctacaggccctgtcacttgccgagatgaatacgctccacccaaagccgaactggatgcccgattacacggtgatctggttaccatcagagcaggttctgatcttgttctggatgctgcagttggtggcaaacctgaacccaaaattatctggaccaaaggagacaaggagctagatctctgtgaaaaagtctctttgcagtatactggcaaacgagcaactgctgtgatcaagttctgtgacagaagtgacagtggaaaatacactttaacagtgaaaaatgccagcgggaccaaggccgtgtctgtcatggtcaaagtgcttgattcccctggcccatgtggaaagctcaccgtcagcagagtaacacaggagaagtgcactttagcctggagccttccgcaggaagacggaggagcagaaatcactcactacatcgtggaaagacgcgagactagcaggctcaactgggtgattgttgaaggcgaatgcccaaccctatcctatgtcgttaccaggctcatcaagaacaatgagtacatattccgagtgagggcagtaaacaaatatggccctggtgtgcctgttgaatcagagccaattgtagccagaaactcattcactattccatcaccacccggcatacctgaagaagttgggactggcaaagagcatatcatcattcagtggacaaaacctgaatctgatggtggcaatgaaatcagcaactacctagtagacaaacgtgagaagaagagcctgcgctggacacgtgtcaacaaagactatgtggtgtatgataccaggctgaaggtgaccagcctgatggagggttgtgattaccagttccgggtgaccgcagtgaatgcagctggtaacagtgagcccagcgaagcttccaacttcatctcatgcagagaaccatcatatacccctggaccaccttctgctccaagagttgtggataccaccaaacacagcattagtttggcatggaccaaacccatgtacgatggtggtactgacattgtaggatatgttctggaaatgcaagagaaggacactgatcagtggtaccgagtgcataccaatgccacaataagaaatactgaattcactgtgccagaccttaaaatgggccagaaatattccttcagagttgctgccgtgaacgtgaagggtatgagcgaatacagcgaatcaattgctgaaattgagcccgtggaaagaatagaaataccagatcttgagcttgcagatgatctaaagaagactgtgaccatcagggctggggcctccttgcgcttgatggtgtctgtatctggaagaccacctcctgtcataacgtggagcaagcagggcattgaccttgcaagccgggcaattattgacaccactgagagctactcattgctaatagtggacaaagttaatcggtacgatgctggaaaatacacaattgaagctgaaaaccaatctggcaagaaatcagcaacagtccttgttaaagtctatgatactcctggtccctgtccttcagtgaaagttaaggaagtatcaagagattctgtgactataacttgggaaattcccacgattgatggtggagctccagtcaacaattacatcgttgagaagcgtgaagctgctatgagagcattcaaaacagtaactaccaaatgcagcaagacactttacagaatttctggacttgtagaaggaaccatgtactatttcagagtgctgccagaaaatatttatggcattggagaaccttgtgaaacatctgatgcagtactggtctcagaagtgcctttggtgcctgcaaagctagaagtggtcgatgtcaccaaatccactgttacccttgcctgggaaaaaccactctacgatggtggtagccgactcactggatatgttctcgaggcctgcaaagctggcacagagagatggatgaaggttgtcaccttaaaacccacagtcctagagcacactgttacttccttaaatgaaggtgaacaatacttatttagaataagggcacaaaatgagaaaggtgtgtcagaaccaagagagactgtcacagccgtgactgtacaagacctcagagtgttgccaacaatcgatctttctacaatgcctcagaagaccatccatgtcccagctggcagaccagtagagctggtgatacctattgctggccgtccacctcctgctgcttcctggttctttgctggttctaaactgagagaatcagagcgtgtcacagttgaaactcacactaaagtagctaaattaaccatccgtgaaaccactatcagagatactggagaatacacacttgaattgaagaatgttaccggaactacttcagaaaccattaaagttatcattcttgacaagcctggtccaccaacaggacctattaagattgatgaaattgatgctacatcaattaccatttcctgggaaccacctgaattggacggtggtgctccactgagtggttatgtggtagaacaacgtgacgctcatcgtccaggatggctgcccgtttctgaatcagtgactaggtccacgtttaagtttaccagactcaccgaaggaaatgagtatgtgttccgtgtggctgcaacaaaccgcttcgggattggctcttacttgcagtctgaggtcatagagtgtcgcagcagcatccgtattcctggacccccagaaacattacagatatttgatgtttcccgtgatggcatgacacttacttggtacccaccagaggatgacggtggctcccaagtgactggatatattgtggagcgcaaagaagtgagagcagatcgatgggtccgtgtaaataaagtacctgtgacaatgacacggtaccgctccactggccttactgaaggcttagaatatgaacaccgtgtcacagccattaatgcaagagggtctgggaaaccaagtcgtccttccaaacccatcgttgccatggatccaattgctcctccaggaaagccacaaaacccaagagttactgatacaacaaggacatcagtctccctggcctggagtgttccagaagatgaaggaggatctaaagtcacaggctacttgattgaaatgcaaaaagtagatcaacatgaatggaccaagtgtaacaccactccaaccaagattcgagagtatactctaacacacctacctcagggtgcagaatacaggttccgcgtcctagcttgtaatgctggtggacctggtgagcctgctgaggtaccaggaacagtcaaagtcactgaaatgcttgaatatcctgattatgaacttgatgaaagataccaagaaggtatctttgtaaggcaaggtggcgtcatcagacttaccataccaatcaaaggaaaaccattcccaatatgtaaatggaccaaggaaggccaggatattagtaagcgtgccatgattgcaacatctgaaacacacactgagcttgtgatcaaagaagcagacaggggtgattctggcacttatgacctggttctggaaaataaatgtggcaagaaggctgtctacatcaaggtcagggtgataggaagtcccaacagtccagaagggccactggaatatgatgacatccaagtccgctctgtgagggtcagctggagacctcctgctgatgatggtggtgctgacatcttaggctacatcctcgagagacgagaagtgcctaaagccgcctggtataccattgattccagagtccgaggtacatctctggtggtaaaaggcctcaaagagaatgtagaataccatttccgtgtttcagcagaaaaccagtttggcataagcaaacccttgaaatctgaggaaccagtcacaccaaaaacaccattgaatcctccagaacctccaagcaatcctccagaagtactcgatgtaaccaagagttctgttagcttgtcctggtcccggcccaaagatgatggtggttctagagtcacaggctactacatcgaacgcaaagagacatccactgacaagtgggtcagacacaacaagactcagatcaccaccacaatgtacactgtcacagggcttgttcccgatgctgagtatcagttccgcatcatcgcacagaatgatgttggcctgagtgagaccagccctgcttctgaaccagttgtttgcaaagatccatttgataaaccaagccaaccaggagaacttgagattctttcaatatccaaagatagtgtcactctacagtgggagaaacctgaatgtgatggtggtaaagaaattcttggatactgggttgaatatagacagtctggagacagtgcctggaagaagagcaataaggaacgtattaaggacaagcaattcacaataggaggtttgctggaagctactgagtatgaattcagggtttttgctgagaatgagactgggctgagcagacctcgcagaactgctatgtctataaagactaaactcacatctggagaggccccaggaatacgcaaagaaatgaaggatgttaccacaaaattgggtgaagctgctcaactctcatgccagattgttggaaggcctcttcctgacattaaatggtacagatttggtaaagagctcatacaaagccggaaatacaaaatgtcttcagatggacgcacacacactcttacagtaatgacagaggaacaggaagatgaaggtgtttatacctgcatagccaccaatgaggttggagaagtagaaaccagtagtaagcttctcctgcaagcaacaccgcagttccatcctggttacccactgaaagagaaatattatggagctgtgggttccacacttcggcttcatgttatgtacattggtcgtccagtacctgccatgacttggttccatggtcagaaacttttgcaaaactcagaaaacattactattgaaaacactgagcactatactcatcttgtcatgaagaatgtccaacgtaagactcatgctgggaaatacaaagtccagctcagcaatgtttttggaacagttgatgccatccttgatgtggaaatacaagataaaccagacaaacctacaggaccaattgtgatcgaagctctattgaagaactccgcagtgatcagctggaaaccacccgcagatgacggaggctcctggatcaccaactatgtggtggaaaaatgtgaggccaaggagggggctgaatggcaattggtgtcttcagccatctcagtgacaacctgtagaattgtgaacctcacagaaaatgctggctattacttccgggtttcagctcagaacactttcggcatcagtgaccctctagaagtgtcctcagttgtgatcattaagagtccatttgaaaagccaggtgctcctggcaaaccaactattactgctgtcacaaaagattcttgtgttgtggcctggaagccacctgccagtgatggaggtgcaaagattagaaattactaccttgagaagcgtgagaagaagcagaataaatggatttctgtgacaacagaagaaattcgagaaactgtcttttcagtgaaaaaccttattgaaggtcttgaatacgagtttcgtgtgaaatgtgaaaatctaggtggggaaagtgaatggagtgaaatatcagaacccatcactcccaaatctgatgtcccaattcaggcaccacactttaaagaggaactgagaaatctaaatgtcagatatcagagcaatgctaccttggtctgcaaagtgactggtcatccaaaacctatcgtcaaatggtacagacaaggcaaagaaatcattgcagatggattaaaatataggattcaagaatttaagggtggctaccaccagctcatcattgcaagtgtcacagatgatgatgccacagtttaccaagtcagagctaccaaccaagggggatctgtgtctggcactgcctccttggaagtggaagttccagctaagatacacttacctaaaactcttgaaggcatgggagcagttcatgctctccgaggtgaagtggtcagcatcaagattcctttcagtggcaaaccagatcctgtgatcacctggcagaaaggacaagatctcattgacaataatggccactaccaagttattgtcacaagatccttcacatcacttgttttccccaatggggtagagagaaaagatgctggtttctatgtggtctgtgctaaaaacagatttggaattgatcagaagacagttgaactggatgtggctgatgttcctgacccacccagaggagtcaaagttagtgatgtctcacgagattctgtcaacttaacatggactgagccagcctctgatggtggcagcaaaatcaccaactacattgttgaaaaatgtgcaactactgcagaaagatggctccgtgtaggacaggcccgagaaacacgttataccgtgatcaacttatttggaaaaacaagttaccagttccgggtaatagctgaaaataaatttggtctgagcaagccttcagagccttcagaaccaaccataaccaaagaagataagaccagagctatgaactatgatgaagaggtagatgaaaccagggaagtctccatgactaaagcatctcactcttcaaccaaggaactctatgagaaatatatgattgctgaagatcttgggcgtggtgagtttggaattgtccatcgttgtgttgaaacatcctcaaagaagacatacatggccaaatttgttaaagtcaaagggactgatcaggttttggtaaagaaggaaatttccattctgaatattgctaggcatagaaacatcttacacctccatgaatcatttgaaagcatggaagaattagttatgatctttgagtttatatcaggacttgacatatttgagcgcattaacacaagtgcttttgaacttaatgaaagagaaattgtaagttatgttcaccaggtctgtgaagcacttcagtttttacacagtcataatattggacactttgacattagaccagaaaatatcatttaccaaaccagaagaagctctaccattaaaatcatagaatttggtcaagcccgtcagctgaaaccaggggacaacttcaggcttctattcactgccccagaatactatgcacctgaagtccaccagcatgatgttgtcagcacagccacagacatgtggtcacttggaacactggtatatgtgctattgagtggtatcaacccattcctggctgaaactaaccaacagatcattgagaatatcatgaatgctgaatatactttcgatgaggaagcattcaaagagattagcattgaagccatggattttgttgaccggttgttagtgaaagagaggaaatctcgcatgacagcatcggaggctctccagcacccatggttgaagcagaagatagaaagagtcagtactaaagttatcagaacattaaaacaccggcgttattaccacaccctgatcaagaaagacctcaacatggttgtgtcagcagcccggatctcctgtggtggtgcaattcgatctcagaagggagtgagtgttgctaaagttaaagtggcatccattgaaattggcccagtttctgggcagataatgcatgcagttggtgaagaaggaggacatgtcaaatatgtatgcaaaattgaaaattatgatcagtctacccaagtgacttggtactttggcgtccgacagctggagaacagtgagaaatacgaaatcacctacgaagatggagtggccatcctctatgtcaaagacattaccaaattagatgatggtacctacagatgcaaagtagtcaatgactatggtgaagacagttcttatgcagagctatttgttaaaggtgtgagagaagtctatgactattactgccgtagaaccatgaagaaaattaagcgcagaacagacacaatgagactcctggaaaggccaccagaatttaccctgcctctctataataagacagcttatgtaggtgaaaatgtccggtttggagtaactataactgtccacccagagcctcatgtaacatggtataaatcaggtcagaaaatcaaaccaggtgacaatgacaagaagtacaca

SEQ ID NO: 1157 - DNA, 100000 bp, Homo sapiens
acaggattgctgagctgggctttctccaataataacatgatcaaaataaaataaaagaagtccttttggcctctgacatcacatcctggagtggatgatttaccagttggtcatctgctgtgctgcaggaatgaatgtagctactgtggtatgaagcaaaattctaacgttcctagaaagtgttagacctgtcaacctccaggaaggatgagatctgcttccacactgcacagtgtccagaagatcaggaccatgtgtcacttggttcaaagatgacttctaagtggtacctggagatactgaatgcctagaaagatgacaactcaagcaccgacgtttacgcagccgttacaaagcgttgtggtactggagggtagtaccgcaacctttgaggctcacattagtggttttccagttcctgaggtgagctggtttagggatggccaggtgatttccacttccactctgcccggcgtgcagatctcctttagcgatggccgcgctaaactgacgatccccgccgtgactaaagccaacagtggacgatattccctgaaagccaccaatggatctggacaagcgactagtactgctgagcttctcgtgaaagctgagacagcaccacccaacttcgttcaacgactgcagagcatgaccgtgagacaaggaagccaagtgagactccaagtgagagtgactggaatccctacacctgtggtgaagttctaccgggatggagccgaaatccagagctcccttgatttccaaatttcacaagaaggcgacctctacagcttactgattgcagaagcataccctgaggactcagggacctattcagtaaatgccaccaatagcgttggaagagctacttcgactgctgaattactggttcaaggtgaagaagaagtacctgctaaaaagacaaagacaattgtttcgactgctcagatctcagaatcaagacaaacccgaattgaaaagaagattgaagcccactttgatgccagatcaattgcaacagttgagatggtcatagatggtgccgctgggcaacagctgccacataaaacacctcccaggattcctccgaagccaaagtcaagatccccaacaccaccgtctattgctgccaaagcacagctggctcggcagcagtccccatcgcccataagacactccccttccccggtcagacacgtgcgggcaccgaccccatctccggtcaggtccgtgtctccagcagcaagaatctccacatcccccatcaggtctgttaggtctccattgctcatgcgtaagactcaggcatccaccgtggccacaggtcctgaagtgcctcccccttggaagcaagagggctacgtggcctcctcatctgaggctgagatgagagagacaacgctgacaacctctactcagatcaggacagaagagagatgggaagggagatacggtgtccaggagcaagtgaccatcagtggtgctgcgggtgctgccgccagtgtgtcggccagtgctagctacgcagcagaggctgttgccactggtgctaaagaggtgaaacaagatgctgacaaaagtgcagctgttgcgactgttgttgctgccgttgatatggccagagtgagagaaccagtgatcagcgctgtagagcagactgctcagaggacaaccacgactgctgtgcacatccaacctgctcaagaacaggtaagaaaggaagcggagaagactgctgtaactaaggtagtagtggccgccgataaagccaaggaacaagaattaaaatcaagaaccaaagaagtaattaccacaaagcaagagcagatgcacgtaactcatgagcagataagaaaagaaactgaaaaaacatttgtaccaaaggtagtaatttccgcagctaaagccaaagaacaagaaactagaatttctgaagaaattactaagaaacagaaacaagtaactcaagaagcaataagacaggaaactgagataactgctgcatccatggtggtagttgccactgcaaagtccacaaaactagaaacagtcccgggagctcaagaagaaactaccacacaacaagatcaaatgcacctaagttatgaaaagataatgaaggaaactaggaaaacagttgtacctaaagtcatagttgccacacccaaagtcaaagaacaagatttagtatcaagaggtagagaaggcattactaccaaaagagaacaagtgcaaataactcaggagaagatgagaaaggaagccgagaaaactgccttgtctacaatagcagttgctactgctaaagccaaagaacaagaaacaatactgagaactagagaaactatggctactagacaagaacaaatccaagttacccatggaaaggtggacgttggaaaaaaggctgaagctgtagcaacagttgttgctgcagtagaccaggcccgagtcagagagcccagagagcctgggcatcttgaagaatcctatgctcagcagaccactttggagtacggatataaggaacgcatttccgccgcaaaggtagctgagcctccccaacgtccagcctcagaaccccacgttgtccctaaagcagtcaagcctagagtaatccaggctccttctgagactcatatcaaaactactgatcaaaagggaatgcacatatcatcacagatcaagaaaactacagatctaacaacggaaagattagtccatgtggataaacgcccccgcacagctagccctcactttactgtttcaaaaatttctgttcctaagacagaacatggatatgaggcatcaatagccggtagtgctattgccacattacaaaaagagttgtcagccacatcttctgctcagaagatcaccaaatcggtgaaggctcctactgtgaagcccagtgagactagagtaagggcagagcccacacccttgccacagttccccttcgctgacacaccagatacttacaagagtgaagctggcgttgaggtgaaaaaggaagtaggggtgagcatcactggcaccaccgtccgtgaagagcgctttgaagtactgcacggacgcgaagccaaggtaacagaaacagcaagagtaccagcacctgttgaaattcctgttactccaccaactttggtctcgggcttaaaaaatgtgactgtcatagaaggtgaatctgtcaccttggagtgccacatctctggatacccatccccgacagtgacatggtacagggaagactaccaaatcgaaagttccattgacttccagataaccttccagagtggaattgctcgtcttatgattcgcgaagcatttgcggaagacagcgggcgatttacttgcagtgctgtaaatgaggctggaaccgtcagcacatcctgctatctggctgtgcaggtgtcagaagaatttgaaaaggaaaccacagccgtgactgagaaatttactacagaagagaaacgctttgttgagtcaagagatgtggttatgactgatactagcctcacagaggaacaagcagggcctggagaacctgccgcgccttactttattacaaaaccagtggtccagaaactggtggaaggtgggagcgtggtgtttggatgccaagttggcggcaacccaaagccccatgtatactggaaaaaatctggtgttcctctaaccactggatacagatacaaagtgagttacaacaaacaaaccggtgaatgcaagctggtgatttctatgacttttgctgatgatgctggagaatacactattgttgttcgcaataagcatggagaaacttctgcatctgcttccttgcttgaagaagctgattatgagttactgatgaagtcccagcaagaaatgctttatcagacacaagtgactgcatttgttcaagaacctaaagttggagaaacagcacctggatttgtatactctgagtatgaaaaagagtatgaaaaagaacaagccttaattaggaagaaaatggccaaagatactgtagtggtcagaacttatgtagaagatcaggaattccatatttcttcctttgaagagagacttattaaagaaattgaatatagaataataaagactacattagaagaacttcttgaagaagatggagaagaaaagatggcagttgacatttctgaatctgaagctgttgaatcaggatttgatttaagaatcaagaattatagaattcttgaggggatgggtgtcacttttcattgcaagatgtctggatatccattaccaaagattgcttggtacaaagatggcaagcgcatcaaacatggagaaagataccaaatggactttctacaagatggcagagctagtctgcgtatacctgttgttcttccagaagatgaaggaatctacactgcatttgccagcaatattaaaggaaatgcaatttgctcagggaaattgtatgtggagcctgctgcaccacttggagctccgacttacattcccacactagagccagtgagcagaatcagatctctctctccacgttcagtgagcaggtctcctatacgcatgtctcctgcacggatgtcacctgcaaggatgtctcctgcacggatgtcccctgcaagaatgtcccctggacgtaggctggaggagacagatgagtcacaacttgagagactatataaaccagtctttgtgttaaaacctgtttctttcaaatgtttagaagggcaaactgccagatttgacttaaaggttgttggtagacctatgccagagacgttctggtttcatgatggccagcaaattgtcaatgactatacccataaagtagtcattaaagaagatggtactcaatcactaattattgtccctgccacacccagtgattctggggaatggactgtggttgcccaaaacagggcaggcagatcttcaatttcagtgattttaactgtggaagctgtggaacatcaggtaaaaccgatgtttgtagaaaaactgaaaaatgtcaatataaaggaaggttcccgacttgaaatgaaagtcagagctacgggtaaccccaaccctgacattgtatggttgaaaaacagtgacatcattgtgcctcataaatatcccaaaatcagaattgaaggaaccaagggagaagctgcccttaaaatcgattccactgtcagccaagattctgcctggtatactgcgactgctattaataaagctggcagagacactacaagatgcaaagtaaatgttgaagttgagtttgcagagcctgagccagagagaaagttaatcatcccacgggggacatatagagcaaaggagattgcagccccagaactggagcccctccatttgcgatatggccaagagcaatgggaagaaggtgatctctatgacaaagagaaacaacagaaaccatttttcaagaaaaaactcacttccttaagacttaagcgctttgggcctgcccactttgaatgcaggctaacacccattggtgacccaacgatggtggtggagtggctccatgatggaaagccacttgaagcagccaacaggctccgtatgatcaatgaatttgggtactgcagccttgattatggcgttgcatattctagagacagtggtatcattacttgcagagccactaacaaatatggaacagatcacacatctgctacccttattgttaaagatgagaaaagtcttgtggaagaatcccaattgcctgaggggaggaaaggcttacagagaattgaagaattagagagaatggctcatgaaggtgcacttacaggtgtaacaacagatcagaaagaaaagcaaaagccagacattgtcttgtacccagagccagttagagtacttgaaggggagactgcaaggttccgctgcagggtaacaggctaccctcagcccaaagtcaactggtacctcaatggacagctcatccgcaaaagcaaaaggttcagagttcgctatgatggtatccattacctggacatcgtggactgcaaatcatatgacacaggtgaagtgaaggtcaccgcggaaaatcctgaaggtgtgatagagcataaagtgaagcttgagattcaacagagggaagattttaggtctgtccttaggagagctcctgaaccaaggcctgagtttcacgtacatgaaccaggaaagcttcagtttgaagtacaaaaagtggatagacctgttgacaccactgaaaccaaagaagttgtgaagttgaaaagggctgaaagaattacccatgaaaaagtgcctgaagagtcggaagagctgcgcagtaaattcaagcgcagaacagaagagggctattatgaagccattaccgctgtggagctcaagtctcgaaagaaggatgaatcctatgaggaactcctcaggaagacaaaagatgaacttctccactggaccaaagagttaactgaagaggaaaagaaagctcttgccgaagaaggcaaaatcacgattccaacttttaaacctgacaagattgaactaagtcctagtatggaggctccaaaaatcttcgaaagaatccagagccaaacagtgggccaaggatctgatgcacacttccgggtcagagtcgtggggaaaccagaccccgaatgtgaatggtacaaaaatggtgtcaaaattgaacggtctgaccggatctactggtactggcccgaagacaatgtttgtgaattggtcataagagatgtgactgctgaggactctgccagcatcatggtaaaagccatcaacatagctggagaaacctccagtcacgcattcttacttgtccaagccaagcaattgatcactttcacacaggaattacaagatgttgttgctaaggaaaaagacactatggcaacctttgaatgtgaaacttcagaaccatttgtcaaagtgaaatggtataaagatggtatggaggttcatgagggagataaatacaggatgcactctgacagaaaggttcacttcctctccatactgaccattgatacgtctgatgctgaagattacagctgtgtacttgtggaagatgaaaatgtcaaaacgactgctaaacttattgttgaaggtgcagttgttgagtttgtgaaagaacttcaggacatagaagttccagaatcatattcaggagaattagagtgcattgtatccccagaaaatatagaaggaaaatggtatcataatgatgtggagcttaaatccaatggcaaatatacaattacatctcgtcgtggacgtcagaacctcacggtcaaggatgtaaccaaggaggaccagggagaatacagctttgtcatcgacgggaaaaagacaacctgtaaattaaagatgaaaccccgccccattgctatcctacaaggacttagtgaccaaaaagtctgtgagggtgacattgttcagcttgaagttaaagtctccttggaaagtgtggaaggcgtctggatgaaagacggccaagaagtgcagcccagtgacagggttcacattgtgatagacaaacaatctcatatgctgctcattgaagacatgactaaggaagatgctggaaattactctttcaccattccagcccttggcctctccaccagtgggcgtgtctctgtctatagtgtggacgtgataacacctctaaaagatgttaatgtgattgaaggcaccaaggctgtgcttgaatgtaaggtgtcagtccctgatgtgacttctgttaagtggtacttaaatgatgaacaaatcaagcctgatgaccgtgtacaggccattgtgaaaggtactaaacagcgactagtcattaaccgaactcatgcttcagacgaaggaccttacaagctgatagttggcagagttgaaaccaactgtaatctctctgtagaaaaaattaaaattatcagaggtcttcgtgaccttacctgtacagaaactcaaaatgtggtgtttgaggttgagctgtcccactctggaattgatgtcctgtggaattttaaggacaaggaaatcaagcccagttctaaatataaaattgaagcacatggaaaaatatataaattgacagttctaaatatgatgaaagatgatgaaggaaaatacacattttacgcgggagaaaatatgacatctggaaaacttactgtggcaggtggggccatctccaagccactcacagatcagaccgtagctgaatcccaggaagctgtgtttgaatgtgaagttgccaacccagattccaaaggcgaatggttgagggatggcaaacacctaccactgactaacaacatcagaagtgagtctgatggccacaaaaggagacttatcattgctgccaccaaattagatgacattggagaatatacctacaaggtggccacctccaaaacatctgccaaactcaaagttgaagctgtcaaaattaagaagactctgaagaacctcacagtgacagaaacacaggatgctgttttcactgtcgagcttacacaccctaatgtcaaaggtgtccagtggatcaaaaatggagttgtgctggaatccaatgaaaagtatgctatctctgtcaaaggaacaatttactctctgaggattaaaaactgtgccatcgtggatgagtctgtttatggcttcaggcttggaaggcttggagccagtgccagactgcacgtggagactgtcaagatcattaaaaagccaaaggatgtgacagccttggaaaatgccactgttgcctttgaagttagtgtttcccatgacactgttccagtaaaatggttccataagagtgtggaaattaagccaagtgacaaacacagactggtctcagaaaggaaagtccacaagctgatgctgcagaacatctccccctcagatgctggggaatacacagctgtggtcgggcaattggaatgcaaagcaaaactgtttgtggagacattacatattacaaaaaccatgaaaaatatcgaggtgcctgagaccaaaactgcctcttttgagtgtgaggtgtcccacttcaatgtcccttccatgtggctgaagaatggtgtggaaattgagatgagtgaaaagttcaagatagttgtgcagggaaaactccatcagctgatcatcatgaacaccagcacagaggactcggcagaatacacatttgtctgtggcaatgaccaagtcagtgccaccctgacagtcaccccaatcatgattacttccatgctgaaagacatcaacgctgaagaaaaagacactattacttttgaggtgacagtgaactatgaaggcatctcttacaaatggttaaagaatggtgtggaaatcaaatcaactgacaagtgccagatgagaaccaaaaagctcacacactcactgaacatcaggaatgttcactttggggatgctgctgactacacctttgtggctggaaaagcaacatcaacagccacactttatgtggaagctcgtcatatagaatttaggaaacacattaaggacattaaggtactggagaagaagcgagccatgtttgaatgtgaagtttctgaacctgacatcactgtacagtggatgaaagatgaccaggaactgcagatcacagacagaataaagattcagaaggagaaatatgtccaccgccttctgatcccatccacccggatgtctgatgctgggaagtacacagtggtggcaggaggcaacgtgtcaactgcaaaactctttgtagaaggcagagatgttcgcatccgaagtattaaaaaggaggttcaggtcattgagaaacagcgtgctgttgttgaatttgaggtcaatgaagacgatgttgatgcccactggtataaagatggcattgaaatcaatttccaagttcaagaacgacacaaatatgtagtggaaagaagaatccaccgaatgtttatctctgagaccagacagagcgatgcaggagaatacacctttgtggcaggaaggaacaggagttctgtcactctctatgtcaatgctcctgaaccgccccaagttctgcaggagctccagcctgtcactgtgcagtctggcaagcctgcccgcttctgtgccatgatatccggaagaccacagcccaaaatttcctggtacaaggaagagcagctgctttccactggcttcaagtgcaaatttcttcatgatgggcaagagtacacgcttttgctaattgaagccttcccagaggatgcggcagtctatacctgtgaagccaagaatgactatggtgttgccacaacatcagcttcactctcagtggaagttccagaagttgtgtctcctgatcaggaaatgcctgtttatccacctgccatcatcaccccgcttcaggacactgtcacttctgaagggcagccagcccgttttcaatgccgggtttctggaacagatctaaaagtgtcgtggtacagcaaagacaagaaaatcaagccatctcggttctttagaatgactcaatttgaagacacttatcaactggaaattgccgaagcttatccagaagatgaaggaacttacacgtttgttgctaataatgctgtaggccaagtatcaagcacagccaacctgagtctggaagctcctgaatcaattttgcatgagaggattgaacaagagattgagatggaaatgaaagagttttctagttcttttctgtctgccgaggaagaaggacttcatagcgccgaacttcaattatctaaaataaatgaaacacttgaacttttgtctgaatctccagtttacccaactaaatttgattccgaaaaggaaggcactggcccaattttcatcaaagaagtgtcaaatgctgatataagcatgggggatgtggctacactgtctgtaactgtcattggcatccccaaacctaaaattcagtggttctttaatggagtgctattaaccccttctgctgactacaaatttgtttttgacggtgatgatcatagcctgatcattctgttcaccaaattggaggatgagggagagtatacatgtatggccagtaatgactatggaaagacaatatgtagtgcctatctaaaaattaattccaaaggagagggtcacaaagacactgaaacagaatcagcagtggcaaaatctctggaaaagctgggaggtccttgtcctcctcacttccttaaggagttaaaaccaattcgctgtgctcaagggcttcctgccatctttgagtacacagtggttggagagcctgcccctactgttacatggttcaaagaaaacaagcagctttgcaccagtgtttattacactatcattcataaccctaatggctctggaactttcattgtcaatgaccctcagagggaagacagtggcctctatatctgtaaagcagagaatatgttgggtgagtccacctgtgcagcagagctgcttgtgcttctggaagacacagacatgactgataccccctgcaaagcaaagtccacaccagaggctcctgaggattttccacagacacccttaaagggtcccgcagttgaagcacttgactcagagcaggaaattgcaacgtttgtaaaagacaccattttgaaagctgctttaattacagaagaaaaccagcaactatcttatgagcatattgctaaagccaatgaattgagcagtcagcttcctttgggagctcaggaattgcaatccattttggagcaagacaagctcactcctgaaagcaccagggaatttctttgcatcaatggcagtattcactttcagcctctcaaggaaccatctcccaacctacagctgcagattgtacagtcccagaaaaccttctccaaagaaggtattctaatgcctgaagagcctgagacacaggcagttctatcagataccgagaaaatcttcccaagtgccatgtccatagaacaaattaattcattaacagttgagcctctgaaaactttattagctgaacctgaagggaattatccacagtcttcaatagaacctccaatgcattcttatctaacctctgtggctgaggaagtactttcaccaaaagaaaagacagtatctgacaccaacagagagcaaagagtgactcttcaaaagcaagaggcacaaagtgcgctcatcttgagtcagagcttagctgagggacacgtggagagtctccagagtcctgatgtcatgatctctcaggtaaactatgagcccctagtcccttcagaacactcatgcacagaaggaggtaaaattttgatagaaagtgcaaatccactggaaaatgcagggcaagattctgcggtcagaattgaggaaggcaagtccttaagatttccactagcacttgaagaaaagcaggtactgctcaaagaagagcattctgacaacgtggtgatgcccccagaccaaatcattgagtctaaaagagagcccgtggcaataaagaaagtgcaggaggtacagggaagggaccttctttctaaggaaagcttgctttctggtattccagaagagcagagattaaacctgaaaattcaaatctgccgggctttgcaagcagccgtggccagcgagcagccaggtcttttctctgagtggctaagaaatattgaaaaggtggaggtcgaggctgtaaacatcacccaagagcccagacacatcatgtgcatgtaccttgttacttcggcaaagtctgtaacagaagaagtaaccatcattattgaagatgttgatcctcaaatggctaacctgaaaatggaacttagggatgctttgtgtgctattatatatgaggaaatagacatcctaacagctgagggtcctagaattcagcaaggagccaaaacaagtttgcaagaagaaatggattctttttcaggttcacagaaggttgaacccattactgaaccagaagttgaatctaaatatctgatctcaactgaagaggtcagttattttaacgtgcaaagtagggttaaatatttggatgccacacctgtcactaaaggggttgcttcagctgttgtctctgacgaaaaacaagatgagagtctgaaaccatcagaggaaaaagaggagtcttcctctgaaagtggtactgaggaggttgctacagtaaagatacaggaagctgagggtggcttaatcaaagaggatggccccatgatacatacacctttagtggacactgtttctgaggaaggtgatattgtacacctcacaacatccataacaaatgctaaagaggtgaattggtattttgagaataaactggtgccttcagatgaaaagttcaagtgtttacaagatcaaaatacatatacgctagtcatcgacaaagtaaataccgaagaccatcaaggagagtatgtctgtgaggccttgaatgacagcggaaaaacagcaacttcagccaaactcactgtagtaaaaagagctgccccagtgatcaagaggaaaatcgaacccctggaagtagcactgggccacctagccaaattcacctgtgagatccaaagtgctcccaatgtccggttccagtggtttaaagctggccgagaaatttatgagagtgacaagtgttctattcgatcttcaaagtatatctccagccttgaaatcctgagaacccaggtggttgactgcggcgagtatacatgcaaagcttccaatgagtatggcagtgtcagctgtacagccacactaactgtgacagaggcatatccaccaacctttctctccagacctaagtcccttacaacttttgtgggtaaggcagccaagttcatctgcacagtgacagggactcctgtgatagaaaccatttggcagaaagatggtgctgcactctcaccttcacctaactggaggatttccgacgcagaaaacaaacacattttagaactctcaaaccttaccattcaagatagaggagtttattcttgtaaggcttctaacaagtttggagcagacatctgccaagcagagttgatcatcattgataagccacatttcattaaagaattagagcctgtgcagtccgctatcaataagaaggtccaccttgagtgccaagtagatgaagacagaaaagtcacagttacgtggagcaaagatgggcaaaaactccccccagggaaagattataagatctgttttgaagataaaatagcaacacttgagattcctttggccaaactgaaagattcaggaacctatgtctgtacagcttcaaatgaggctggaagcagctcctgctcagccacagtcactgtcagagagccaccatccttcgtgaagaaggtggatccctcttatttaatgctcccaggtgaatcagcacgcctccattgcaagctgaaaggctcacctgtgatccaggttacttggtttaaaaataacaaagaactcagtgaaagtaacacagtccgaatgtattttgtcaattctgaggctatacttgatattacggatgtaaaagttgaagacagtgggagttactcatgtgaagcagtgaatgacgtcggcagtgatagctgcagtactgaaatagttatcaaagaacctccttctttcatcaaaactcttgagcctgcagacatagtgagaggaacaaatgctctacttcagtgtgaagtctcaggcactggaccatttgaaattagctggttcaaagacaagaaacaaattcgaagtagtaaaaaatacagattgttttctcagaagtctcttgtgtgtctggagatcttttcgtttaatagtgcagatgttggtgaatatgaatgtgttgttgctaatgaagtcggcaagtgtggctgcatggcaacccacttactcaaagaacctccaacctttgtaaagaaagtagatgatttgattgcactaggaggacaaaccgttaccctgcaagctgctgtgagagggtcagagcccatttctgtcacatggatgaaaggtcaagaggtcatcagagaagacggaaaaatcaaaatgagcttttccaatggtgttgcagtcttgataatccctgatgttcagattagttttggaggcaaatacacgtgcctggctgaaaatgaagctggaagccaaacatctgttggggaattaatagttaaagaacctgccaaaatcattgagcgagcagaactgatccaggtgacagcaggagatcccgccacactggagtacacagtggcaggcacgccagaactgaagcccaaatggtacaaagatgggagacccttggtcgccagtaaaaaataccgaataagttttaaaaacaatgttgcccagctcaaattttattcagctgagctgcacgacagtggccaatacacatttgagatttccaatgaagtgggcagcagctcctgtgagactacattcactgtattagatcgagacattgctccattttttaccaaacccttgcgcaacgtggatagtgttgttaatggtacctgcagactggactgcaaaattgcaggctccctccccatgagggtgtcctggtttaaggatggcaaagaaatagctgcttctgacagatacaggatagcatttgtggaaggcacagcctctttggagatcatcagagtagacatgaatgatgcagggaatttcacttgtcgagccacaaattccgtgggaagcaaagacagcagtggagccctgattgtgcaagaaccacccagttttgtaactaaacccggctcaaaggatgttctgcctggctcagcagtctgcctgaagagcactttccaaggatctactcctctcacaatcagatggtttaagggcaacaaagagctggtttctggtggaagctgctatattaccaaagaagctttagagagttccctggaactctatttagtaaaaacctctgattcgggcacgtacacatgtaaagtcagcaatgtcgctggaggggtggaatgcagtgcaaacttgtttgtaaaagaacctgccacatttgttgaaaagttagagccatcacagctgttaaagaagggagatgccacccagctagcctgcaaagtaactggtacccctccaattaaaataacatggtttgcaaatgatagagaaattaaggagagcagcaaacacagaatgtcttttgtggagtctactgcagttctaagactgacagatgttggcatcgaagacagtggtgaatatatgtgtgaggcccaaaatgaggctggcagtgaccactgcagtagcattgtaatagtcaaagagtcaccttattttaccaaggaatttaagccaattgaagtcttaaaggagtacgatgtcatgttgctggctgaggtggcaggcactcctccctttgagatcacttggttcaaagataacacaatcctgcgaagtggtagaaagtataagactttcattcaggatcatctggttagcctgcagatcctcaagtttgtagctgcagatgctggcgaataccagtgtcgggtgaccaatgaggtgggcagcagcatctgcagtgccagggtgactttaagagaacccccatccttcataaagaagatcgagagtaccagctccctccggggaggcacagctgccttccaggccactctgaagggctccttgccaattacggtgacttggctaaaagacagcgatgaaatcactgaagacgataatataagaatgacctttgagaacaatgtggccagtttgtacctcagtggcattgaagtcaagcatgatgggaaatatgtctgtcaggccaaaaatgatgcaggaatacaaagatgttctgcattactctcagtaaaagaacctgcaacaatcaccgaggaagctgtgtctatagatgtcacccaaggagacccagccactttgcaggttaaattttcagggactaaggagattacagccaaatggtttaaagatggccaagaactgaccctgggctcaaaatataaaatcagtgtcactgatacagtctcaatactgaagattatttctacagaaaagaaagatagtggagaatatactttcgaggtccaaaatgatgttgggaggagcagctgcaaggctagaattaatgtattagatcttatcatacctccttcattcaccaaaaagctgaagaaaatggacagcattaaaggttctttcattgatttagaatgtatagtggctgggtcacatcccataagcatccagtggttcaaagatgaccaagaaatatcagctagtgaaaagtacaaattctcttttcatgacaatactgccttcttggaaatcagccagctggaaggtacagacagtgggacatacacttgttctgccacaaataaggcagggcacaaccaatgcagtgggcatctgacagtcaaagaacccccttactttgtggaaaagccacagtcacaagatgtcaatcccaacacaagggtacagttaaaggctcttgtgggtggcactgcacccatgacaataaagtggtttaaagataacaaagagttacactcaggagcagcccgctcagtttggaaggatgacacctctaccagtctagagctctttgcagccaaagctaccgattctggaacctacatttgccaactaagcaatgatgttggcacagcaaccagcaaagccactctctttgtaaaagaacctcctcaattcattaagaagcccagtccagtcttagtgctgaggaatggacagtcaacaacatttgaatgccaaataacaggcactcctaaaatccgagtgtcttggtatctagacgggaatgaaataacagccattcagaaacatggcatttccttcattgatggtttagccactttccagatttctggtgccagggtagaaaatagtgggacttatgtgtgtgaagctcgaaatgacgcaggcacggcgagctgcagcattgaactcaaagtgaaagaaccccccacctttatcagagagctgaagcctgtggaggtagtaaaatatagtgacgtggagctggagtgtgaagttacgggaacacctccgtttgaagtcacttggctgaagaataacagggaaattcgaagcagcaaaaaatacacattgaccgacagagtgtctgtgtttaacctccatataaccaagtgtgacccttcagacactggggaataccagtgcattgtatccaatgaaggcggcagctgctcatgcagtactagagttgccctgaaagaaccaccatcattcattaagaagatagaaaataccactactgttttgaaaagttctgccacctttcagagtaccgtggcaggttctcctcctatttctataacctggctaaaggatgatcagattcttgatgaagatgataatgtctatatttcatttgtggacagtgtggccacacttcaaatcagaagtgtggataatggacacagtgggagatatacctgtcaagccaagaatgagtcaggagttgagaggtgttatgctttccttttagtacaagaaccagctcaaatcgtagagaaagctaaatcagttgatgttacggagaaagatcccatgaccttggaatgtgttgtggctggaacaccagaactcaaagtgaaatggcttaaagacgggaaacaaatagttcccagtagatacttttcaatgagttttgaaaataacgtggccagttttagaattcagtcagtaatgaagcaggacagcggtcagtacactttcaaggtggaaaatgacttcggaagcagtagctgtgatgcctacttaagagtgctagatcaaaatattcctccatcattcaccaaaaaattaaccaaaatggataaagttctgggctcttctattcatatggagtgcaaggtgtctggttcacttcccattagtgctcagtggtttaaggatggaaaagaaatatctacaagtgcaaaatacagacttgtgtgccatgagagatctgtgtctctggaagttaataatctggaattagaagatactgcaaattacacatgcaaagtgtcaaatgtagcaggagatgatgcatgcagtggcatcttaactgtgaaagaaccaccaagcttcctagtgaaacctgggcgacagcaagccatacctgattctacagtggaatttaaggcaatactaaaaggaacaccaccatttaaaataaaatggtttaaggatgatgtggaacttgtctcaggtcctaaatgtttcattggcttggaagggtcgactagcttcttaaatctctactcagtggatgcttctaagactggacagtatacttgccatgttaccaatgatgttggtagcgactcttgtactacgatgttgcttgtgacagaaccaccaaagtttgtaaagaaattagaagcctccaaaattgtgaaagcaggtgactcttcacgacttgaatgcaagatagctggatccccagaaatcagagttgtgtggttccgaaatgaacatgaacttccagccagtgataagtacagaatgactttcattgactcagtggccgtcatacagatgaacaatctcagtactgaggacagtggagatttcatttgtgaggctcagaatcccgctggcagcacaagctgcagtaccaaggttatagtaaaagagccacctgtttttagcagcttccctcctatagtagaaacccttaaaaatgctgaagtcagtcttgaatgtgaactttcgggaacaccaccgtttgaggtggtatggtacaaagacaagcggcaactcagaagcagcaagaaatacaagattgcatccaaaaacttccacacaagtattcacattctcaatgtggacacttcagacatcggtgaataccactgcaaagcacagaatgaagtgggaagtgatacttgtgtttgtactgtaaaattgaaagaaccaccaagatttgtctccaaactgaacagcctcactgttgtagccggagagcctgctgaattacaagcatccatagaaggcgcccagcctatttttgtccagtggcttaaagagaaggaagaagtgattagagaaagtgaaaacatcaggattacatttgtggaaaatgttgcaactctacagtttgcaaaagcagagccagctaatgctggaaagtatatctgccaaatcaagaatgatggtggaatgagggagaacatggccacactgatggtcttagagcccgcagtcattgttgagaaggcaggaccgatgacggtgactgtaggagaaacgtgcactctggagtgtaaggtggctggcactccggaactctctgttgaatggtacaaggatggaaagctgttgaccagcagccaaaaacacaaatttagcttctacaacaaaatctcttccttaaggattctctcagttgaaaggcaagatgcaggcacatacactttccaggttcaaaataatgttgggaaaagcagctgcacagctgtggttgatgtttcagaccgagcagttcctccctctttcacacgaagactgaaaaatactggtggggtgttaggtgcttcttgcatcttggaatgcaaagtagctggatcatcacctatttcagttgcctggtttcatgagaaaaccaagattgtcagtggagcaaagtaccaaaccacattttcagataatgtctgcacattgcagttgaattctctggattcctcagatatgggcaattacacatgcgtggctgctaatgtcgctgggtctgatgaatgtcgtgcagtgctaactgtacaagaaccaccctcttttgtgaaagaacctgaacctttggaagtactaccaggcaaaaatgtaaccttcacaagcgttattagaggaacccctccattcaaagtcaactggttcagaggtgccagagaactagtgaaaggagaccggtgcaacatctattttgaagacactgtggcagaactggaattatttaatattgacatatctcagagtggggaatacacctgtgtggtttctaacaacgctggccaagcatcttgcactacccgtctctttgtgaaagaaccagctgcatttttgaagagattaagtgatcattctgtagaaccagggaagtccataattctggagagcacctacactggaacacttccaatttctgtcacttggaaaaaggatggttttaacataactacctctgaaaaatgtaacatagtcacaacagagaaaacttgtatcctggaaattctgaatagcacaaaaagagatgcagggcagtattcctgcgagattgaaaatgaggcaggaagggatgtttgtggagctctggtatctacattagaaccgccttattttgttacggaactggaacctctggaggcagcagttggagattcggtttctttacaatgccaagttgctgggacaccagaaattacagtgtcttggtacaaaggagataccaaattacggccaactcctgaatacaggacctactttacaaacaatgtggccacacttgtttttaataaagtgaacatcaatgacagtggagagtacacatgcaaagcagaaaatagtataggaactgcttcttctaagactgtgttcagaattcaagagcgccaactcccaccttcttttgcaagacaattaaaggacattgaacaaactgtggggttacctgttacactcacttgtcgattaaatggctctgcacccatccaagtgtgctggtatagagatggagtacttttaagagacgatgaaaatctacagacttcatttgtagataatgtggcaactttaaaaattttgcaaactgacttgagtcactctggccagtactcttgctcagcttccaacccacttggaacagcatcttctagtgctagactcacagcaagagaacccaagaaatctcccttctttgacatcaagcctgtatctatagatgttattgctggagaaagtgctgattttgagtgtcatgttactggtgctcaaccgatgcgaatcacttggtcaaaagataacaaggagatccgtcctggaggaaactatacaatcacatgtgtgggaaacactcctcatttgagaattcttaaagtaggcaaaggagactctggtcaatatacttgccaagcaaccaatgatgttggcaaagacatgtgctcagctcagctcagtgtaaaagaacctccaaagtttgttaagaaattagaagcttcaaaagttgcaaagcagggagaatccattcaactggaatgtaaaataagtggctccccagaaatcaaagtttcatggttccgaaatgacagcgaacttcatgaaagttggaaatacaacatgtcattcattaattctgtggcattgcttacgatcaatgaagctagtgctgaagacagcggggactacatttgtgaggctcataatggtgttggtgacgccagctgcagcacagcgttgacagtgaaagcacctcctgttttcacccagaagccttctccagtaggagctcttaaaggttctgatgtgattctccaatgtgaaatttcgggaactcccccatttgaagtagtatgggttaaagatcgaaagcaagttagaaacagcaagaaatttaaaatcacttcaaaacattttgatacaagtcttcatatccttaatcttgaagcctccgatgtcggggaatatcactgcaaagctactaatgaggtgggaagtgacacgtgttcttgctctgtcaagttcaaagaacctccacgattcgtgaaaaagctaagtgacacctcaacccttattggggatgctgttgagttacgggccatagtggagggcttccagccaatttctgttgtctggctgaaagatagaggtgaagtcatcagagagagtgaaaataccaggatttcattcattgataacattgcaaccctccagctggggagtccagaagcatctaattctggaaaatatatatgccaaatcaaaaacgatgctggaatgagagaatgctctgcagtcttgactgtactagaaccagcaagaatcatagagaagcccgaacccatgactgtcactactggaaatccttttgcattagagtgtgtagtgactggaacaccagaactctcagccaagtggttcaaagatggaagagaattgtctgcagacagcaaacatcacattacattcatcaataaagtggcttcccttaaaatcccctgtgccgaaatgagtgacaaaggattatatagctttgaagtgaaaaacagtgttggcaaaagtaactgcactgtatccgtccatgtttctgatcggattgtgcctccttccttcatccgcaagctgaaagacgtgaatgccatcctgggggcctcagttgttttggagtgccgagtctctggctcagccccgatttcagttggctggtttcaggatggaaatgagattgttagtgggcccaaatgtcagtccagcttttcggaaaacgtctgtactttgaatctgagcttgttggagccctccgacacaggcatatacacgtgtgtggctgccaatgtagctggttccgatgagtgctcagcagtcctgactgtgcaagaaccaccatcttttgaacaaacccctgattctgtggaagttttgcctggaatgagcctcacattcaccagtgtcatcagaggcacccctcctttcaaggtcaagtggtttaaaggcagcagggaactggtgcctggggagtcatgcaacatctctctggaagattttgtcacagaactggagttgtttgaggtgcagccattagaaagtggagactattcttgcctcgttacaaatgatgctggcagtgcttcctgtaccacacatctttttgtgaaagaaccagccacctttgtgaaaagattggctgatttcagtgttgagacaggaagccccatagttctcgaggccacatacactggcacacctccaatctcagtgagctggataaaggacgagtatcttatttcacaatctgagagatgcagtattactatgacagaaaaatctaccatactggaaattcttgagagcacaatagaggattatgcacagtacagctgcctgatagaaaatgaggctggtcaagatatctgtgaagctctggtgtctgtcttagaaccaccgtactttattgaacctctggaacatgtggaagcagtcattggagaacctgcaactttacagtgtaaagtggatggaactccagaaattagaatttcttggtataaagaacacacaaagctacgatcagctcctgcatataaaatgcaattcaaaaataacgttgcttccttagtaatcaacaaagtggatcacagtgatgtgggagagtattcatgcaaggcagacaacagtgtgggggcagtcgcttcttcagctgtgcttgttatcaaagcgcgcaaacttccacctttctttgcaagaaaactgaaagacgttcatgagactctaggcttcccagttgcatttgaatgccgcatcaatggctcagaacctcttcaagtgtcttggtacaaggatggggttcttttgaaagatgatgctaatttgcagacatcttttgttcataatgtagcaactcttcagattttacaaactgaccagagccacatagggcagtataattgctctgcttctaatcctcttgggactgcttcatccagtgccaagctcattctctcagagcatgaagtgcctcctttctttgatctaaagcctgtatcagtagatcttgctcttggagaaagtggtacttttaaatgtcatgtaactgggactgcaccaatcaaaatcacttgggccaaagataaccgagagattcgccctggaggcaactacaagatgactttggtagaaaatactgccactctgacagttctcaaagtaggcaaaggcgatgccgggcagtacacctgctatgcaagcaacatcgctggaaaagactcttgttctgctcagctgggtgtacaagaaccacccaggttcattaagaagctagaaccttcaagaattgtgaaacaggatgaattcacaaggtatgaatgcaaaatcggtgggtctccagaaatcaaagttttatggtataaggacgagactgaaattcaagagagcagtaaattcagaatgtcattcgttgactcggtggctgtgctggaaatgcacaatctcagtgttgaagacagtggagactacacctgtgaggcccacaatgcagcaggcagtgccagcagcagcacatccttaaaagttaaagaaccacccattttccgcaaaaagcctcatcctatagagacactgaaaggagctgatgttcaccttgaatgtgagcttcagggcactcccccatttcacgtttcttggtataaagacaagagagaacttaggagcggcaagaagtacaagataatgtctgagaacttcctaaccagtatccacatcctgaatgtcgatgctgcagacattggggaatatcagtgtaaagccacaaatgatgtgggaagcgacacttgcgttggttccatcgctctcaaagcaccaccaagatttgtgaagaagctcagtgacatatctactgtcgttggtaaagaagttcagctgcagactaccattgaaggcgctgaacccatttcagtggtgtggttcaaagataagggagaaatcgttagagaaagtgacaacatatggatttcttattcagaaaacattgcaaccttacagttttcaagagtggaaccagccaatgctggaaaatacacttgtcagatcaaaaacgatgctgggatgcaagagtgcttcgccacgctatccgttctcgagcctgcaacaattgtagaaaagccagaatccataaaagttaccacgggagacacctgtaccttggagtgtacagtagctggcacccctgaactcagtactaagtggtttaaggatggaaaagagctaacaagtgacaacaaatacaaaataagcttcttcaacaaagtatctggccttaagatcatcaatgtagcaccgagtgacagtggggtatacagttttgaggtgcagaaccctgttggcaaagacagctgcacagcttcattgcaggtttcagaccgaaccgttcctccttcattcacaagaaaattgaaagagacaaatggtctatccggctcctcagttgtaatggagtgtaaagtctatgggtcacctccaatctctgtctcctggttccatgaaggaaatgagatcagtagtggaaggaaataccagaccaccctgacagataatacttgtgctttaactgtgaacatgctggaagaatcagacagtggtgactacacatgtatagctactaatatggctggttctgatgaatgtagtgctcctttgactgtgagagaaccaccatcttttgttcagaaacctgatcccatggatgttttaactgggaccaatgtaactttcacaagtatcgtaaaaggaacacctcctttcagtgttagctggttcaaaggtagcagtgaactagtaccaggtgacagatgcaacgtgtctttggaggattcagttgctgaactggagttgttcgatgtagatacatcacaaagtggagaatatacttgcatagttagcaatgaagctggcaaggcttcttgtacaacacatctctacataaaagccccagccaaatttgtgaagaggctgaatgattacagcatagagaaaggaaaacccctgatcctagagggtacattcactggaactcctcccatttcggttacctggaagaaaaatggcataaatgtaactccttctcagaggtgtaatataactacgactgaaaaatcggcaatcctggaaattccaagtagcacagtagaggatgcaggacaatacaactgctacattgaaaatgcctctggaaaagattcctgttcagcacaaatactcatactagaaccaccgtattttgtcaagcagttggagccggttaaggtgtctgttggagattctgcctctctacaatgccagcttgctggaacccctgaaattggggtatcctggtataaaggagatacaaaattgagacccactacgacttacaaaatgcattttaggaataatgttgctacactggttttcaaccaggttgatattaatgatagtggagaatatatctgcaaagctgaaaacagcgtgggagaagtttctgcatcaactttccttaccgttcaagagcaaaaacttccaccatcattttctcgacaattgagagatgttcaagaaacagttggactgccagttgtttttgattgtgccataagtggatcagaacctatctccgtgtcttggtataaagacggcaagccattgaaagacagcccaaatgtacaaacatcatttttagacaatacagccacactcaatatttttaaaactgaccggagccttgcaggccagtattcctgcacagctacaaaccctataggctctgcttcttccagtgccaggctcattctcacagaggggaagaacccacccttctttgacatccgtcttgcccctgtggatgctgtggtgggagaaagtgctgactttgagtgccacgtcacgggcacacaaccgataaaggtcagctgggccaaagacagcagagaaatacgaagtggcggaaagtaccagattagttatctggaaaacagcgcccacctgacagtcctcaaagtagacaaaggagattctggacaatatacctgctatgctgtgaatgaagtgggaaaagactcttgcacagctcagctgaatataaaagagcggctcatcccaccaagtttcactaaaagactctcagagacagtagaagaaacagaagggaattctttcaaacttgagggacgtgtggctggttcccaacctataactgttgcctggtacaaaaataatatagagatacaaccaacttctaactgtgaaataacattcaagaacaacacgttagtgctgcaagtcaggaaagcaggcatgaacgacgctggtttgtacacatgcaaagtgtccaatgatgcaggctctgctctgtgcacgtcttcaatcgtcatcaaagaacctaagaagccacctgtatttgatcagcaccttactccagtaacagtgagtgaaggagaatacgtgcagctcagctgccatgtccagggatctgagccaattaggatccagtggttgaaggctggcagggaaataaagccttcagacagatgcagcttcagctttgctagtgggacagctgtactggaactcagagatgtggctaaagcagattcgggagattatgtgtgtaaagcttcaaatgtggctggaagtgacactaccaaatcaaaagtgaccattaaagacaaaccagctgtggccccagcaaccaagaaagctgcggtagatggaagactcttttttgtgtcagaacctcagagtatcagagtcgtagaaaaaaccactgcgaccttcattgcaaaagttggaggtgacccaatcccaaatgttaaatggacaaaagggaagtggagacagctgaaccaaggaggtcgtgttttcatccaccaaaaaggcgatgaagcaaaactggagattagggacaccacaaaaactgattctgggttataccgatgcgtggcatttaacgaacatggtgaaattgaaagtaatgttaacttacaggtggatgaaaggaagaaacaagagaaaattgaaggcgatcttagagcaatgctgaaaaagactccaatcttaaagaaaggagctggagaagaagaggaaattgatatcatggaacttctcaaaaatgttgatcctaaagaatatgaaaaatatgcccgcatgtatggaatcactgacttccgaggtcttcttcaagcatttgaactgctcaagcaaagccaagaagaagagacacatagactggaaattgaggaaatagagaggtcagagagggacgaaaaggaatttgaggaacttgtatcatttattcagcaaagactgtcacagacagagcctgtcactctgatcaaggacattgaaaatcagacagttttgaaagataatgatgctgtctttgaaattgacattaaaattaattatccagaaatcaagctttcgtggtacaaaggaactgaaaaactggaacccagtgataaatttgaaataagcattgatggtgaccgacatacactcagagtcaaaaactgtcaacttaaagaccagggcaattatcgattggtttgtggtccacacatcgctagcgctaaactaactgtaattgagcctgcatgggaacggcatcttcaggatgtgactctgaaagaaggccagacttgcaccatgacatgccaattttctgtaccaaatgtaaaatctgaatggttcagaaatggcagaatccttaaaccccaaggtagacataaaacagaagtggaacacaaagtccataaattgaccattgcagatgttcgagcagaagaccagggtcagtacacctgcaaatatgaagaccttgaaacttcagcagaactcagaatcgaagctgaaccaattcagtttacaaagcgcatacagaacatcgtggtgagtgagcatcagtctgccacctttgagtgtgaagtgtcctttgatgatgccattgtaacatggtacaaaggaccaacagaactgacagagagccagaaatacaacttcaggaatgatggccgctgccattatatgaccatccacaatgtgaccccagacgatgaaggtgtctactcggtcatcgctcggctggagccaagaggtgaagcaagaagcacggcagagctgtacctaacgacgaaagaaatcaaacttgagctgaagcctcctgatattcctgactccagagttccaatcccaaccatgcctatcagagcagtgccaccagaagaaatccctcctgtggttgctcctcctatcccccttttgctaccaacacccgaagaaaagaaaccaccaccaaaacgtattgaagttaccaaaaaggctgtgaagaaagatgccaaaaaagttgttgcaaagcccaaagagatgacaccacgtgaagagattgtcaagaagcctccacctcctactaccttaattccagcaaaagctcctgaaatcattgatgtatcctctaaagctgaagaagtaaaaataatgactataaccagaaagaaagaggttcagaaagaaaaagaagctgtgtatgagaaaaagcaagcagtccacaaggagaagagagtcttcattgaatctttcgaagaaccttatgacgaactggaggtagaaccatacacagagccatttgaacaaccttattatgaagaaccagatgaagactatgaagagattaaggtagaagctaaaaaagaagttcacgaggaatgggaagaagattttgaagaagggcaagaatactatgaaagggaagaaggctatgacgaaggggaggaagagtgggaagaggcttaccaagaaagggaagtaattcaagttcaaaaggaggtctatgaagaatcacatgagagaaaagttccagccaaagtacctgaaaagaaagcaccaccacctcctaaagttataaagaagccagtaattgaaaaaattgaaaagacttctcgaagaatggaggaagaaaaagttcaagtcaccaaagtacctgaagtttcaaagaagattgttccacaaaaaccttcccggactccagtacaggaagaagttattgaagtgaaagtaccagctgtgcatacaaagaagatggttatttcagaagaaaagatgttctttgcttctcacacagaggaggaggtgtcagtcacagtccccgaggtacaaaaggaaattgttactgaagagaaaattcacgttgccatttccaaaagggttgaaccaccacctaaagtccctgagctacctgagaaaccagctccagaagaagtggcccctgttcctatccctaaaaaagtggagcccccagcaccaaaagttcctgaggttcccaagaaacccgtgccagaggagaaaaagccagttcctgtgcctaagaaggaacctgctgctcccccaaaagtcccagaggtgccaaagaaacctgtccctgaagaaaagattcccgttcctgttgcaaagaaaaaggaagctcccccagctaaagttcctgaagtacagaagggagttgtgacagaagaaaaaataaccattgtaactcaaagagaggaatctccaccaccagcagtgccagaaataccaaagaagaaagttcctgaagaaaggaaacctgttcctcggaaggaggaagaagttccaccaccaccaaaagtgccagctctgcctaagaaacccgtcccagaggagaaagttgcagtgccagttcctgtcgctaagaaagctcctcctccccgagctgaagtctctaagaaaactgttgtagaagaaaagagatttgttgctgaagaaaaactatccttcgcagttcctcaaagagtggaagtcacgcggcacgaagtatctgcagaggaggaatggagttactcagaagaggaggaaggtgtgtccatttcagtttatagagaagaagaaagagaggaggaggaagaagcagaggttacagaatatgaagtgatggaagagcctgaggaatatgttgtggaagaaaagctgcacattatttctaagagagtggaagctgagccagctgaagtgacagagaggcaggagaagaaaattgtactgaaaccaaaaattcctgctaaaatagaggagcctccaccggctaaagttcctgaagcacctaagaaaattgtgccagaaaagaaagttcctgctccagttcctaaaaaggaaaaggtgcccccacctaaagtgccagaagagccaaagaaaccagttccagaaaaaaaggttcctccaaaagtcattaagatggaagaacctctcccagccaaagtgactgagaggcacatgcaaattacccaggaagaaaaagttcttgttgctgtaactaaaaaagaggcgcctccaaaagcaagagtgccagaggaaccgaagagagctgtcccagaagaaaaagttctgaaactcaaacctaaaagagaggaggaaccaccagctaaagtgactgaattcagaaaaagagtggttaaagaagaaaaagtatcaattgaagctccaaaaagagaacctcaacccatcaaagaagtaactataatggaagagaaagaaagggcttataccctagaagaagaagctgtttcagtacaacgggaagaagaatatgaggaatatgaagaatatgattataaagaatttgaggagtatgaaccaacagaagaatatgaccaatatgaagaatacgaggagcgggagtatgaacgatatgaagagcatgaagaatacatcacagaaccagagaagcctatccctgtaaagcctgtcccagaagaaccagttcccacaaaaccaaaggccccaccggctaaagtgctgaagaaagctgtccctgaagaaaaagtaccagtgcccattcctaagaaactcaaacctccaccacccaaagtgcctgaagaaccaaagaaagtttttgaggaaaaaatacgtatttcaattaccaaacgtgaaaaagagcaggtgactgaacccgctgctaaagtgcccatgaagcccaagagggttgtcgcagaagaaaaagtacctgtccctagaaaagaagtagcaccacctgttagagtgccagaagtgcctaaagaacttgaaccagaagaggttgcctttgaagaggaagttgtaacccatgtagaagaatatcttgtagaagaagaagaagagtacattcatgaagaagaggagttcataactgaggaagaagtggtgccagtgataccagtcaaagtgcctgaggtacccaggaaacctgttccagaagagaagaaacctgttcctgttcccaagaagaaggaagctccaccggcaaaagtgcctgaggttcctaagaagccagaggagaaagttcctgtgcttattcctaaaaaggagaagcctccgccagcaaaagttcctgaagtgcccaagaaacctgtgccagaggagaaagtaccagtaccagttcctaaaaaggtggaagctccacctgccaaagtgccagaggtacccaagaagcctgtgcctgagaagaaggtgccagttcctgctcctaagaaagtggaggctccacctgcaaaagtgccagaggtgcccaagaagctcatcccagaagaaaagaaaccaacacctgttccgaaaaaagtggaagcaccaccacccaaagtgccaaagaaacgtgaaccagttccagttcctgtagctctacctcaggaagaggaagttctatttgaagaagaaattgttcctgaagaggaagttctacctgaggaagaggaagttctacctgaggaagaggaagttctacctgaagaagaggaagttctacctgaagaagaggaaattccacctgaggaagaggaagttcctcccgaagaagaatatgtacctgaggaagaagaatttgtacctgaagaagaagtccttccagaagttaaacctaaggtgccagtacctgcaccagtgcctgaagtgccaaagaaacctgtaccagagaagaaagtccctgttcccgcccctaaaaaagtggaacctccaccaccacccaaagtgcctgaaattaagaagaaagtgacagagaagaaagtggtcattcccaagaaagaggaggctccccctgccaaagttcctgaggtgcctaagaaggtggaagaaaaacgaatcattctccctaaagaagaggaagttctaccagttgaagtgactgaggagcctgaagaagagcctatttcagaagaagaaatcccagaagaaccacctagcatagaggaagttgaagaggtggcaccacctagagtgcctgaagtgattaagaaagcagtacctgaagcacctactcctgttcctaaaaaagtggaggcaccaccagctaaagtgtcaaagaaaattcctgaggaaaaagtacctgttcctgttcagaaaaaagaggcacccccagccaaagtgcctgaagtaccaaagaaagtcccagaaaagaaagtccttgtgcctaaaaaggaagctgttcccccagctaaagggagaactgtccttgaagaaaaagtatcagttgccttccgccaagaagtagtagtaaaagaaagactagaattagaagtagtagaagcagaagtggaagaaattccggaagaagaagagttccatgaagttgaagaatattttgaagaaggcgagtttcatgaagtagaagaattcatcaaattagaacaacatagagttgaagaagaacacagagttgaaaaagttcatagggtaatagaagtttttgaggctgaagaagtggaagtatttgaaaaaccaaaagctccacctaaagggcctgagatatctgagaaaatcatccctccaaaaaaaccgcccactaaagttgttcctcgaaaagagccaccagctaaagtaccggaggtgcctaagaaaattgtggtagaagaaaaagtacgtgttcctgaagagcccagagttccaccaactaaagcacccgaagtacccaagaaaattgtcccagaagaaaaagttcgtgaagctgttctgaaaaagcctgaagttccaccagctaaagtacttgtgactcaacctcaaaagacaaaacccaaactagcaaaagtgcctgagccacccaagaaagttgttccagaagacaaaatatatgtgactattcctaaaaagagagaaacaccagcaactaaagaacctgatacaaccagaggcatttttccagaggtggagccacctgaggctattcctgaaattccagaacatcctccaactgaagagtttgaagtcttcaaggaagtcattccagagggagaaactcctattgttaaaagaagaaaaacaccatcaccaacagcaccagaagctatgaaagaagttgtccctgaaatgaaaatatttgaggatgtacctgaagagccagaaactccacgtatgaaaacgcccgaagctcctcaagaaattattcctgccaagacagttccttccaaaaaaagagaacccccatcagttaaagtgcctgaagctctccaagaaattgtccctgaaaagaaaacgcttgtggttcctctcagaaagcctgaagtccttcctgatgaagtgccggaggctctcagagaagttgtcccggaaaagaaagtgcatcctccccaaagggctgaagttgtacctgtcaaagtgcacgaagctcccaaagagattatccctgaaaagaaagtgtcggtggtgcctcctaaaaagcctgaagtcccacctgttaaagtgccagaagcttccaaagaggttatccgcgaagagaaagtgcccttggctcctcctaaagagcctgaagtcccacctgttaaagtaccagagcctcccaaagaagtagttcctgaaaagaaagcgccagtggctcctcctaaagagcctgaagtcccacctgttaaagtgcctgaggctcccaaagaagttgttcctgaaaagaaagtgccagtgcctcctcctaaaaagcctgaagtgccacccacaaaagtcccagaggtgccaaaggcagctgtcccagaaaagaaggtgcctgaagctattcctcccaaaccggaaagtcctccccctgaagtgcctgaagtgctgccaccgaaggaagtggtcccagaaaagaaagtaccggtgcctcctgccaaaaagccagaagctccacctcctaaagttcctgaagctcctaaagaagttgtacttgaaaagaaagcatctgtggctgtgcccaaaaaaccggaagccccacgtgcaaaagtgcctgaagctgctcaagaagttgtcccagaaaagaaaattcccaaggcaccaatcaaaaaaccagaagcccccgcagttacagtgccagaagttcctcaagaagccgcagaaaaagaaattcccgtggctccacccaaaaaaccagaagctccaattgtcccagtgcctgaagtcccacaagaaattgtgccagaaaagaaaacactggtgcttcctaaaaagccagaagttccacctgttacagtgccagaggctcccaaagaagttgtccttgaaaagaaagtgcccttggctcctcctaaaaagcctgaagtcccacctgttaaagtgccagaggctcccaaagaagttgttcctgaaaagaaagtgccagtgactcctcctaaaaaacctgaagtcccacctgttaaagtgccagaggctcccatagaggttgttcctgaaaagaaaatgcccttggctcctcctaaaaagcctgaagtccctcctgttaaagtaccagaggctcccaaagaggttgttcctgaaaagaaagtgccctcggctcctcctaaaaagcctgaagtcccacctgttaaagtgccagaggctccgaaagaagttgttcctgaaaagaaagtgccagcggctcctcctaaaaagcctgaagtcacacctgttaaagtgcctgaggctcccaaagaagttgttcctgaaaagaaagtgccagtgcctcctcctaaaaagcctgaagtgccacccacaaaagtcccagaggtgccaaaggtagctgtcccagaaaagaaggtgcctgaagctattcctcccaaaccggaaagtcctccccctgaagtgttcgaggagcctgaggaagttgccctagaagagcctcctgctgaagttgtggaagagccagagccagcggcgcctccacaagtgaccgtaccacctaagaaacctgtcccagaaaagaaagcacctgctgtcgttgccaaaaaacctgaactaccaccagtgaaagtgcccgaggtgcccaaggaggttgttcctgaaaagaaggtgcctctggtggttcccaaaaagccagaagccccacctgctaaagtgcctgaagttccaaaagaagttgttccagaaaagaaagtagctgttcccaaaaagccagaagtcccaccagcaaaagtgccagaagtgccaaagaaacctgtcttggaagagaaaccagctgttcctgttccagaaagagcggagtctcctcccccagaagtatatgaagaacctgaggaaattgctcctgaagaggaaattgctcctgaagaggaaaagccagttcctgttgcagaagaggaggaaccagaggttccacctccagcagtgcctgaagagcccaagaagatcatcccagagaagaaagttcctgtcatcaaaaaaccagaagcaccgcctcctaaagaacgtgaaattgaaaagtatattaaacctgaagagcccgaacctgaaccacagcctgaagaaataccagtaaaagaacctgaacctgaaaaggttattgagaagccaaaactcaaaccaagacccccacctcctccacctgctccacctaaggaagatgtgaaggagaaaatattccaacttaaagctattccaaagaagaaagttcctgaaaaacctcaggttccagaaaaagtggagcttacacctctgaaagtgcctggaggtgaaaagaaagttcgcaaattacttccggaacgtaaacctgaaccaaaggaagaagttgttctgaaaagcgttctaagaaaaagacctgaagaagaagaacctaaagtagaacctaaaaaactagaaaaagttaaaaaacctgcagtaccagaaccaccacctccaaaacctgttgaagaggttgaagtacctactgttacaaaaagggaaaggaagattcctgaaccaacaaaagtgcctgaaatcaagccagcaatacctctccctgcacctgaaccgaaaccaaagcccgaagcagaagtgaaaacaatcaaaccacctcctgtggaacctgaaccaacccccatcgctgccccagtaacagtgccagtggttggaaagaaagcagaagccaaagcacctaaggaagaggctgccaagccaaaaggtcctatcaaaggtgtacccaaaaagactccttcaccaatagaagccgaaaggagaaagttaaggccaggaagtggtggagagaaacctcctgatgaagccccgttcacctaccagctaaaggctgtgccactgaagtttgtgaaagaaatcaaagacatcatcttgacagaatcagagttcgttggctcttcagcaatctttgaatgtttggtctccccttccactgcaattacaacctggatgaaagacggtagcaatatccgtgagagtcccaagcacaggtttattgcagatggtaaagacagaaagctgcacatcattgatgttcaactttccgatgctggtgaatacacctgtgttttacgtttgggaaacaaagaaaagacctccacggctaaacttgttgtagaagaacttcctgtgcgttttgtaaaaacactggaagaggaagtcacagtggtcaaaggacagccattgtacttgagctgcgagttaaacaaagagcgtgacgtggtctggaggaaggatggcaagattgtggtggagaaacctggccgaattgtgccaggcgtcattggcttgatgcgggctctgaccatcaacgatgcagatgacacagatgctggaacatacacagttactgtggaaaacgccaacaacctggagtgttcatcttgcgtaaaagtagtagaagtcattagagattggctggtgaaacctatacgagaccagcatgtgaaacccaaggggacagctatttttgcctgtgatatagcaaaagatactccaaacattaagtggttcaaaggatatgatgaaatccctgcggaaccaaatgataagactgaaatactgagagatggaaatcatctgtacctcaaaattaagaatgctatgccagaagatattgctgagtatgcagtggaaattgaaggaaaaagataccctgcaaagctgacacttggagagcgtgaagttgaactgcttaaaccaatagaggacgttaccatttatgagaaagaaagtgcaagctttgatgcagaaatctcagaggcagacattcctggacaatggaaactgaaaggagaacttctaaggccctcacctacttgtgaaatcaaagcagaaggtggaaaacgcttcttaactttgcacaaagtcaaactggaccaagctggtgaagtcctctaccaggcccttaatgcaattacaactgccattttgacagtaaaagaaatcgaacttgactttgctgtgcccctgaaggatgtcactgttccagaaaggcgacaggctcgattcgaatgtgtcctcacccgagaggcaaatgttatatggtccaaaggacctgatataattaagtcatctgacaaatttgatatcatcgctgatggaaagaaacatattcttgttattaatgattctcaatttgatgatgaaggggtctatactgctgaggtggagggcaagaagacctcagctcggttgtttgtcacaggtataagactgaaattcatgtcacctcttgaagatcaaacagtaaaagaaggtgaaacagcaacttttgtttgtgaactttctcatgaaaaaatgcatgtagtctggttcaaaaatgatgccaaactccatacaagcagaacagtactcatctcttctgagggcaagactcacaaattggaaatgaaagaagtgacattggatgatatatctcagataaaagctcaagtcaaggagctgagctccacagcacagctgaaggtcttagaggccgatccctacttcactgtgaaattacatgacaaaactgcagtggagaaggatgagattactttgaagtgtgaagtgagcaaagatgtaccagtgaaatggttcaaagatggtgaagagattgtcccttcacccaaatattctatcaaggcagatggcctgcgccgcatcttaaaaatcaaaaaggcggaccttaaagataaaggcgaatatgtgtgtgactgtggcacagacaagaccaaggcaaatgttactgttgaggctcgactaataaaagtggaaaagcctctgtacggagtagaggtgtttgttggtgaaacagcccactttgaaattgaactttctgaacctgatgttcacggccagtggaagctgaaaggacagcctttgacagcttcccctgactgtgaaatcattgaggatggaaagaagcatattctgatccttcataactgtcagctgggtatgacaggagaggtttccttccaggctgctaatgccaaatctgcagccaatctgaaagtgaaagaattgcctcttatcttcatcacacctctcagtgatgttaaagtcttcgagaaagatgaggctaagtttgagtgtgaagtatccagggagcccaaaacattccgttggctaaaaggaacccaggaaatcacaggtgatgacagatttgagcttataaaggatggcactaagcattcaatggtgatcaagtcagctgcttttgaagatgaagcaaaatacatgtttgaagctgaagataagcacacaagtggcaaactgatcattgaaggaatccggctcaaattcctcacccctctcaaagatgtaactgccaaagagaaggaaagtgctgtatttactgtggagttatctcatgataacatccgagttaaatggttcaagaatgaccagcgcctacacaccaccaggtcggtctcaatgcaagacgaagggaaaactcattcgatcacattcaaagacctgtctattgatgacacctcccaaattagagtagaagctatggggatgagttcagaagctaaactcactgtgcttgagggagacccatattttacaggaaaacttcaagattatactggtgtagagaaagatgaagttattctacagtgtgaaattagcaaagcagatgcaccagtgaaatggtttaaggatgggaaggaaataaagccatccaaaaatgctgttattaaggcagatggcaagaaacgcatgctaatcctaaagaaagccttgaaatcagatattggacagtacacctgtgactgtgggacagataagacctcaggaaaacttgacattgaggatcgggaaattaaactggtgcgacccctgcacagtgtggaggtgatggagactgagacagcacgctttgaaaccgaaatctctgaagatgatatccacgccaactggaaactcaagggagaggccctactccaaacacctgattgtgaaattaaggaagaaggcaaaatacactcccttgttttgcacaactgtcgcctggaccagacgggtggggtggatttccaagctgccaatgttaaatctagtgcccacctccgagttaagccacgagtaattggtcttctgaggcctttaaaggatgtcaccgtgactgcaggggaaacagccaccttcgactgcgagctctcctacgaagatatcccagtggaatggtatctcaaagggaagaaactagagcccagcgataaggtggtcccacgttcagaaggaaaagttcatacacttactctgagggatgtaaagttagaagatgctggggaagtccaactaacagcaaaagatttcaaaactcacgccaacctctttgtgaaagaacccccagttgaattcactaagcctcttgaggaccagacggtcgaagagggagccactgcagtgctggagtgtgaagtctccagagaaaatgctaaggtgaaatggttcaaaaatgggacagaaatcctcaaaagcaagaagtatgaaattgttgctgatggcagggtcagaaaacttgttatacatgactgtaccccagaggatattaaaacatacacttgtgatgctaaggattttaagacttcctgtaacctgaatgtcgtgcctcctcatgtggaattcttaagaccactcaccgaccttcaagttagagaaaaagaaatggctcgatttgagtgtgaactttcccgagaaaatgctaaggttaagtggtttaaagatggtgctgaaattaaaaagggcaaaaaatatgacatcatatccaagggagcagtgcgcattcttgtcatcaacaaatgtctactggatgatgaagctgaatattcctgtgaagtaaggacagcgagaacttctggcatgctgacagttctggaagaagaagctgtctttaccaaaaatcttgccaacattgaagttagtgaaacagacactataaaactggtttgtgaagtctccaaacctggcgcagaagtgatttggtataaaggggatgaggagatcattgaaacaggaagatatgaaatactgactgaaggacggaagagaatcctggtcattcagaacgctcaccttgaggatgctggcaactacaactgtcgactcccaagctctcgaaccgatggcaaagtcaaagtacatgaactggctgctgaatttatctcaaagcctcaaaaccttgaaatacttgaaggagaaaaggctgaatttgtctgctctatatcaaaagaaagctttccagtccagtggaagagggatgataagacacttgaatctggagataaatatgacgttattgctgatggtaaaaagagggtcctagttgtgaaagatgccacattacaagatatgggcacttacgttgtcatggtaggggccgccagagcagcagctcacttgacagtcattgaaaaactcaggatcgtagttcctcttaaggacacccgggtgaaggaacaacaggaagttgtcttcaactgtgaagtcaatactgaaggtgccaaagccaaatggttcagaaatgaagaagctatatttgatagttcaaaatacatcattctccaaaaagacctagtctacaccctcagaattagagatgcacacttagatgaccaagccaactataatgtgtctttgaccaatcacagaggtgaaaatgttaaaagtgcagccaatctaatagtagaagaggaagaccttaggattgttgagcctcttaaagatattgaaacaatggagaagaaatctgtcacattctggtgcaaggtgaatcgtctcaatgtaacactgaagtggaccaaaaatggtgaagaagtgccttttgacaaccgtgtctcatacagagttgataagtacaagcacatgttaaccattaaagactgtggcttcccagatgaaggtgaatacattgtcactgctggacaagataaatctgttgctgagcttctcatcatagaagccccgacagaatttgtggaacacttggaagatcagacagtcactgagttcgatgacgctgtcttctcctgccagctctccagagagaaagccaatgtaaaatggtacagaaatgggagagaaatcaaagaaggcaaaaaatacaaatttgaaaaagatggaagtatacacagactcattataaaagattgcaggctggatgatgagtgtgaatatgcttgcggggtagaagacaggaagtctcgtgctagactttttgtggaagaaattcctgttgagatcatcaggcctccacaagatattcttgaagcccctggtgctgatgttgtctttttagcagaactcaataaagataaggtggaagtccaatggctaagaaataacatggttgttgtccagggtgataaacaccagatgatgagtgaaggaaagatacatcgactacagatttgtgatattaagccccgtgaccagggtgaatacagatttattgccaaagacaaagaagccagagctaagcttgaactggcagctgcaccaaaaatcaagacagctgaccaagaccttgtggttgatgttggcaagcctctgacaatggtggtgccatatgatgcctaccccaaagcagaagctgaatggtttaaagaaaatgaacctttatctacaaaaaccattgatactacggctgaacaaacttctttcagaattttagaagccaagaaaggagacaaagggaggtataaaattgtgcttcagaacaaacatggaaaagcagaaggattcatcaatttaaaagttattgatgttcctgggccagtacgtaacttagaagtgacagaaacatttgatggtgaagtgagccttgcttgggaagaacctttaactgatggtggaagcaaaatcataggttacgttgttgaaagacgtgacattaagagaaagacctgggttctggccacagaccgtgcagagagttgtgagtttactgtcactggtctacagaaaggaggagttgagtacctattccgtgtgagtgcaagaaacagagttggcactggtgagccagtagaaactgacaatcctgtagaagcaaggagtaaatatgatgttccaggccctcctttgaatgtaaccatcactgatgtgaatcgatttggtgtctcactgacatgggaaccaccagagtatgatggaggtgctgagatcacaaactacgtcattgaattaagagacaagacttctatcaggtgggatactgccatgactgtgagagctgaagacctgtctgcaactgttactgatgtggtagaaggacaggagtacagtttccgagtgagagcccaaaatcgaattggagttggaaaaccaagtgcagccacacccttcgtcaaagttgctgatccaattgagagaccaagtcctcctgtaaacctaacttcctcagatcagactcagtcatcagttcagctcaaatgggaacctcctctgaaagatggaggaagcccaatattaggctatataattgagcgatgcgaagaaggaaaagataattggattcgttgcaatatgaaacttgtccctgaactgacttacaaggttaccggattggaaaaaggaaataaatatttatatagagtatctgcagaaaataaagctggtgtttcagatccatctgaaattcttggtcctctcaccgctgacgatgcatttgttgaaccaacaatggatttaagtgcatttaaagatggtctggaagttattgtcccaaatcctatcacgatcctggttccaagtacaggctatccaaggccaactgcaacctggtgttttggagataaagtactagaaacaggggaccgggtgaaaatgaagaccttgtctgcctatgccgaacttgtcatttctccaagtgaacgttcagacaagggcatttatacactgaaattagaaaaccgtgtgaaaacaatttctggggaaattgatgtcaatgtaattgctcgcccaagtgcacccaaagaattgaaatttggtgatataaccaaggactcagtacatttgacttgggaaccacctgatgatgatggaggaagtccgttaactggatacgttgttgaaaaacgagaagtcagccggaaaacatggactaaagttatggactttgtgactgatctagaattcacagttcctgatcttgttcaaggaaaagagtacttatttaaagtttgtgctcgtaacaaatgtggccctggagaacctgcatatgttgatgaacctgtaaatatgtcaactcctgcaacggtacctgacccaccagagaatgttaaatggagagatcgaacagccaatagcatcttcttaacatgggatccacctaaaaatgatggtggttcacgcatcaaaggatatatagttgaaagatgtccacgtggttctgataaatgggttgcctgtggagaacctgttgcagaaacaaaaatggaagtgacaggtcttgaggaaggcaaatggtatgcctaccgcgtgaaggccttaaacaggcagggtgctagcaaaccaagcagacccacagaggaaatccaggctgtggacacacaagaggccccagaaatcttcctcgatgtgaagctccttgctggtctcactgtaaaagctgggaccaagattgaacttcctgccaccgtaaccggaaaacctgaacctaaaataacttggacaaaggctgatatgattctgaagcaggacaaaagaattaccattgaaaatgtccctaagaaatccacagtgactattgttgatagtaagagaagtgacactggcacatatatcattgaggctgtgaatgtgtgtggccgggccactgctgtggtggaagtgaacgtcttagataaacccggaccaccagctgcctttgacatcacagatgtaaccaatgagtcatgtcttctaacatggaacccaccacgcgatgatggtggatctaagatcacaaactatgttgtggagagacgagcaactgatagtgaagtgtggcacaagctctcatccaccgtcaaggatacaaacttcaaggccaccaaattaatccccaataaagagtacatcttcagagttgctgcagaaaacatgtatggtgttggtgaaccagttcaggcctctccaataacagccaaatatcagtttgatccacctggtcctccaactcgcctagaaccttctgatatcactaaagacgcagtgactctcacatggtgtgagccagatgatgatggtggcagcccaatcacaggatactgggttgaaagactggatcctgatacagataaatgggttagatgcaataagatgccagtaaaggacacaacatacagagtgaaaggtctcactaataagaaaaaatacagattccgtgtgttggctgaaaatcttgctggacctggaaaaccaagcaaatcaactgaaccaatcttaataaaggatcccatagatcctccatggccccctggaaaaccaactgtaaaagatgtaggcaaaacatcagtaaggttgaattggacaaaaccagaacatgatggaggtgcaaagattgagtcttatgtcattgaaatgctgaagactggaacagatgagtgggtcagagtggcggaaggggttcccaccactcagcacttgctcccagggctcatggaaggacaggaatactcattccgagttagagctgtgaataaggctggggaaagtgaacccagtgaacccagtgaccctgtgctttgccgggagaagctatatcctccatcaccaccacgctggcttgaagttattaatatcacaaaaaatacagcagacctaaaatggacagttcctgagaaagatggagggtcccccatcaccaactacattgtggaaaagagagacgtcaggcgaaaaggctggcaaacagtggataccactgtcaaggacaccaagtgcacagtcaccccactgactgagggctctttatatgtgttccgagttgctgcagaaaatgctataggacaaagcgactacaccgaaattgaggactctgtgctggccaaagacacctttaccactcctggaccaccctacgccctggcagtggttgatgtgacaaaacgacatgttgacctaaagtgggagccacctaaaaatgatggtggaagaccaatacagagatatgtcattgagaagaaagaaaggttaggtacccgttgggtgaaagctggaaagactgcaggacctgactgtaacttcagagtaactgatgtcatcgaaggaacagaggtccagtttcaggttcgggctgaaaatgaagctggagttggccacccaagtgaacccacagaaatcctatccattgaagatccaacaagtcctccctcaccaccccttgacctacatgtgactgatgctgggagaaaacacattgccattgcttggaagcctccagagaaaaatggtggaagtcctatcataggataccatgttgaaatgtgtccagtaggcactgagaaatggatgagagttaattctcgcccaataaaggacttgaaattcaaggttgaagaaggtgttgttcctgacaaagaatatgtcctgagagtgagagcagtcaatgctattggtgtcagcgagccatctgaaatctctgaaaatgtggttgccaaagacccagactgcaagccaacaattgacctggagactcatgacattattgttattgaaggtgaaaagttaagcattcctgttcccttcagagctgtcccagttccaactgttagttggcataaagatggcaaagaagttaaagcaagtgatagattaacaatgaagaatgatcacatctctgcacaccttgaagttcccaagagtgtccgtgcagatgccggaatttataccattacactggagaataagctcggctcagcaacagcctcaatcaatgtcaaagtcataggcctacctggaccatgcaaagatattaaagcaagtgacattaccaagagttcttgtaagttaacttgggaacctccagaatttgatggtggaaccccaattcttcattatgtcctggagcgcagagaagctgggaggagaacatatataccagtcatgtctggtgagaacaaactgtcatggactgtgaaggatctcataccaaatggtgaatacttcttccgtgttaaagcagtcaacaaggttggtggaggagaatatattgaactgaaaaatccagtcattgctcaagatccaaagcaaccccctgatccacctgtagatgtagaggttcataatcctacagcggaggcaatgactattacatggaagccacctttgtatgatggagggagcaagataatgggctacatcatagagaagattgctaagggtgaagaaaggtggaagagatgcaatgaacacctggtaccaatcctgacctatacagcaaaaggacttgaagaggggaaagagtaccaattccgtgtgcgagcagagaacgccgcgggtattagtgaaccttctcgggctactcctccaaccaaagctgtagatcccattgatgcccccaaagtcattctgagaacaagcctagaagtgaaacgaggtgatgaaatagcacttgatgcaagtatttctggatcaccttacccaactattacatggataaaggatgaaaatgttattgtaccagaggaaattaagaagcgtgcagcacccttggttaggagaaggaagggtgaagttcaagaagaagaaccatttgtcctgcctctgacacagcgtttgagtattgacaacagcaaaaagggagaatctcagctacgcgtccgagattctctccgacctgaccatggtctgtatatgatcaaagttgaaaatgaccacggtattgcaaaagctccttgtactgtcagtgtgttagatacaccgggaccaccaatcaactttgtatttgaagatatcagaaagacctcagtcctttgtaaatgggaaccaccccttgatgatggtggcagtgaaatcataaactacactttggaaaagaaagacaagacaaaacccgactcagaatggattgttgtcacttcaacacttagacattgcaaatattcagtaacaaaactgattgaaggaaaagagtacctcttccgtgtaagagctgaaaacagatttgggccaggtccaccatgtgtttcaaagccacttgtggctaaagatccatttggaccacctgatgcaccagataagcccattgtggaagatgttaccagcaacagtatgctagtgaaatggaatgaaccaaaagataatggaagccccattttgggttactggcttgaaaaacgtgaagttaacagtacacattggtctcgtgtcaacaaaagccttctgaatgccttgaaagccaatgtagatggcttattagaaggactcacctatgtcttcagagtatgtgctgaaaatgcagctggacctggaaagttcagtccaccttcagatcccaaaacagcacatgatccaatctctcctcctgggccacctatcccaagagtcactgacacaagctctacaactattgaactagaatgggaacccccagctttcaatggtggtggggaaattgttggctattttgttgataagcagttggttggcacaaatgaatggtcacgctgcacagagaagatgatcaaggtccgtcagtacaccgtcaaagaaatccgagagggtgctgattacaaacttcgggtgagtgctgtcaatgccgcaggggaaggaccgcctggagaaacacaacctgttactgtggctgaaccacaagagcctccagctgtggaactggatgtttctgtcaagggtggaatacaaataatggctgggaagactcttagaattccagctgtggtgactggtcgccctgtacctacaaaagtatggaccaaagaagaaggggagctggataaagaccgtgttgtaatagacaacgttggaaccaaatctgaactaattatcaaggatgcactgcgaaaagaccatggcagatatgtgattacagctacaaatagctgtggttccaaatttgcagcagccagggtagaagtttttgatgtccctggtccagttcttgacttaaaacctgttgtaacaaacagaaaaatgtgtctacttaactggtctgatccagaagatgatggaggaagtgaaataacaggctttatcattgaaagaaaagatgccaagatgcatacttggagacaaccaatagagactgagagatctaaatgtgacatcacaggtctgcttgagggacaagaatataagttccgtgttattgccaagaacaagtttggctgtggccctcctgttgaaataggaccaattcttgcagttgatccactaggtcctccaacatctccagagaggctcacatacactgaaaggacaaagtccactatcacacttgactggaaagagccccgcagtaatggtggcagtcccatccaaggatatatcattgaaaaacggcgtcatgacaaacctgactttgaaagagttaacaagcgactctgcccaaccacatcttttctggttgaaaatcttgatgaacaccaaatgtatgagttccgtgtcaaagctgtcaatgaaattggtgaaagtgaaccatccctacctcttaatgtagtcatacaagatgatgaagtgcctccaactattaagttgcgtctgagtgttcgaggagacactatcaaagttaaggcaggagagcctgtccacatccctgcagatgtgacaggccttccaatgcctaagattgaatggtccaaaaatgaaactgtaattgaaaaacccactgatgcacttcagataaccaaggaagaggtatcccgaagtgaggcaaaaactgagcttagcattcccaaagcggtccgggaggacaaaggcacttacacagttactgcttccaatcgccttggctcagtgttccgaaatgttcacgttgaagtatatgaccgcccatccccaccaagaaatcttgctgttactgacattaaagctgaatcttgctacttgacatgggatgcccctcttgataatggtggcagtgaaatcacccattatgttattgacaaacgtgatgcaagtaggaagaaagcagaatgggaggaagtcaccaacactgctgtagagaaaagatatgggatctggaaacttatccccaatggtcagtatgagttccgagtcagggcagtgaataaatatggaatcagtgatgagtgcaaatcagataaagtagtcattcaagatccttatcgccttcctggacctccaggaaaaccaaaagttttggcacgcaccaaaggatcaatgctagtgagctggactcctcctttggacaatggtggctctccaattactggctactggctggagaaaagagaagagggaagtccttattggtcacgtgttagccgagcaccaataaccaaagtgggattgaaaggcgtggaatttaatgttcctcgtttgcttgaaggcgttaaataccagttcagagccatggcaataaatgctgcaggaattggtcctcccagtgaaccatcagatccagaggttgcaggagatcccatatttccaccggggccaccttcttgcccagaagttaaagataaaacgaagtcaagcatctcactaggatggaaacctccagccaaagatggtggcagcccaatcaaaggatacattgtagaaatgcaagaagaaggtactactgactggaaaagagtaaatgaaccagacaaacttataactacctgtgaatgtgtggtgcctaatctgaaagagctcaggaagtacagattcagagtgaaagctgtcaatgaagctggtgaatctgaaccaagtgatacaactggggagatccctgccactgatattcaagaggaaccagaagttttcattgacattggagcacaggactgtctggtttgtaaagctggctcacagattaggattcctgctgtcatcaagggacgcccaacaccaaaatcatcttgggaatttgatggaaaggcaaagaaagcaatgaaggatggagttcatgacatacccgaagatgcacagctggagactgctgaaaactcctcagtaattattattccggagtgtaaacgatctcatacaggcaaatacagcatcacagccaagaataaagcaggacaaaagactgcaaattgcagagttaaagtcatggatgtaccaggcccacccaaagatctgaaagtcagtgatatcacaaggggtagttgcagactttcatggaagatgccagacgacgatggaggagacaggatcaaaggctatgttattgagaagaggactattgatggaaaagcctggaccaaagtcaatccagactgtggaagcaccacatttgtagtgcctgatctcctctctgaacagcaatatttcttccgtgtgcgagcagaaaaccgttttggtattggcccacctgtggaaaccattcagaggaccactgccagagatccgatatatcctcctgatcctcctattaaactcaagattggcctcatcacaaagaacacagtgcatctgtcatggaaacccccgaagaatgatgggggctcccctgttacccactatattgttgagtgccttgcatgggaccctactgggacaaagaaagaagcctggaggcagtgcaataagcgtgatgtggaagaactgcaatttactgttgaagacctagtagagggtggggaatatgaattccgagtcaaagctgtcaatgctgcaggagtcagcaagccttcagccactgttggccctgtgactgtcaaagaccagacatgcccaccatcaattgatctaaaagaattcatggaggttgaagaaggaaccaatgttaacattgtggccaaaattaaaggtgtgccattcccgacactaacctggtttaaagctcctccaaagaagcctgataacaaagaacctgttctctatgacacccatgtcaacaaactggtggtagatgatacttgcactttagttattccgcagtctcgcaggagtgacactggcttatataccatcacagctgtaaataatctgggaacagcatcaaaggagatgagactgaatgtcctgggtcgtcctggccctccagtgggacccataaaatttgaatctgtttcagcagatcaaatgacactatcttggtttccacctaaagatgatggtgggtctaagattacaaactatgtaattgagaaaagagaagctaacaggaagacatgggtccatgtctccagtgaacctaaggagtgcacgtacacgattcccaaattgctagaaggccatgaatatgtattccgaatcatggcccagaataaatatggcattggagaacctcttgacagtgaacctgaaacagcaagaaacctcttctctgtccctggagcaccagataaaccaacagttagcagcgtgactcgtaactccatgactgtcaactgggaagagccagaatatgatggaggctctcctgtgacagggtactggctggaaatgaaagacaccacttcaaagagatggaagagagttaaccgagatcctatcaaagccatgactttgggtgtttcttataaagtgactggtcttattgaaggttccgactatcaattccgggtatatgcaatcaatgctgctggcgtgggtccagcaagtctgccatcagacccagcgactgctagagatccaattgcccctcctggtcctccatttcccaaagtgacagattggactaaatcatctgcagatctggagtggtctcccccactaaaagatggtggatccaaagtaactggatacatcgttgaatataaagaagaaggaaaagaagaatgggaaaagggtaaagataaagaagtgagaggaacaaagcttgttgtgacaggattaaaggaaggagcattctacaaatttagagttagagcagtcaacattgctggcattggagaacctggagaggtcacagatgtcattgaaatgaaggacagacttgtttcacctgaccttcagctagatgccagtgtcagagatagaattgttgtccatgctggaggggtgatccgaatcattgcctatgtgtctggaaagcctcctccaaccgtcacctggaacatgaatgaaagaaccttacctcaagaagccaccattgagaccacagccattagctcatccatggtcatcaagaactgccagaggagccatcaaggcgtctattctcttcttgccaaaaatgaagccggagaaagaaagaagacaattattgttgatgtattagatgttccaggtcccgttggaacaccattcctagctcacaacctaaccaatgagtcctgcaaactgacatggttttctccagaagatgatggaggctctccaatcaccaattatgtcattgaaaagcgtgaatctgaccgcagagcatggaccccagtgacatatacagttacccgacaaaatgctactgtccagggtctcattcaaggaaaagcctactttttccgaattgcggctgaaaatagtattggcatgggtccatttgttgagacatcagaggcacttgttatcagagagccaataactgtaccagagcgtcctgaagacctggaagtcaaagaagttactaaaaatactgtaactttgacttggaatcctcctaagtatgatggtgggtcagaaattattaactatgtcctagaaagtcggctcattgggactgagaagttccacaaagttacaaatgacaacttgcttagcagaaaatacactgttaaaggcttaaaagaaggtgatacctatgagtaccgtgtcagtgctgtcaacattgttggacaaggcaaaccatcattttgcaccaaaccaattacttgcaaggatgagctggcacccccaacgcttcacctcgacttcagagataagctcacgattcgagttggtgaagcttttgccctcactggccgttactcaggcaaaccaaagcctaaggtttcctggttcaaagatgaagctgatgtgctggaagatgatcgcactcatataaagactacaccagcaacacttgctttagagaagatcaaggccaaacgttcagattccggcaaatactgtgtggttgtggagaacagtacaggctctaggaaaggtttctgtcaagttaatgttgttgaccgtcctggaccaccagtaggaccagttagttttgatgaggtgaccaaagattacatggttatctcttggaagcctcctttagatgatggaggcagtaaaatcaccaattatattattgagaagaaggaagtgggtaaagacgtctggatgccagtgacatctgcaagtgctaaaacaacatgcaaagtttctaaactacttgaaggaaaagattatattttccggatacatgctgaaaatctgtatggaataagtgatcctctggtgtctgattcaatgaaagccaaagatcgtttcagggttcctgatgcacctgatcagccaattgttacagaagttaccaaagactctgcattagtaacctggaataagccacatgatggaggaaaacccatcacaaactacatcctggaaaagagagaaactatgtctaaacgatgggctagagttaccaaagatcctattcatccatacactaaatttagggttcctgatcttctagaaggatgtcagtatgaattccgggtttctgcagaaaatgaaattggtattggagatccaagcccaccatccaaaccagtctttgctaaagatccaattgctaaaccaagtccacctgttaatcctgaagcaatagatacaacatgcaattcagtcgatctaacttggcagccaccacgtcatgatggtgggagcaagattctgggttatattgttgagtaccagaaagttggagatgaagagtggagaagagccaatcacacccctgagtcatgtcctgaaactaaatataaagtcaccggtcttcgggacggtcaaacctataagtttagagtgttagcagtcaatgcagctggtgaatcagatccagctcatgttccggagccagtcctagtaaaagacaggcttgaaccccctgagttgattcttgatgccaacatggcaagagaacaacacattaaagttggtgatactctaagacttagtgccatcatcaaaggagtgccattcccaaaagtaacttggaaaaaagaagacagagatgctccaactaaagcaagaattgatgtgactccagttggtagcaagcttgaaattcgtaatgctgcccatgaagatggtggaatttattctttaacagtggagaatccagctggttcaaaaactgtctcagtaaaagtacttgtattagataaacctgggccacctagagatctggaagtcagtgaaattaggaaagattcatgttaccttacttggaaagaaccactggatgatggtggttctgttattaccaattatgtggttgagaggagagatgttgccagcgcccagtggtcacctctctcagctacatcaaagaaaaagagtcacttcgctaagcatctgaatgaaggcaaccagtacctcttccgagtagctgcggagaaccagtatggacgtggtccttttgttgaaacaccaaaaccaatcaaggctttggatcctctccatcccccagggccacccaaggacctgcaccatgtagatgttgacaagactgaagtctccctagtctggaataagccggatcgtgatggtggttctccaatcactggatatttggtagaatatcaagaagaaggcacccaggactggattaaatttaagactgtgacaaacttagagtgtgtggttactggactacaacaaggaaagacctatagattccgtgtaaaagctgaaaacattgtgggtcttggtctccctgacacaactatcccgatagaatgtcaagaaaaactagtgcctccatccgtggagctagatgtgaaattaattgaaggtcttgtggtaaaggctggaaccacagtcagattccctgctattataagaggtgtgcctgttcctactgcaaagtggacaaccgatgggagtgagattaaaaccgatgagcactacacagttgaaacagacaacttctcatcagtacttaccattaagaactgcttaaggagagacactggggaatatcaaatcacagtttccaatgcagccggtagcaaaacagtagccgtacatcttactgttcttgatgttcctgggccaccaacaggtcctattaatattctggatgttactcctgaacacatgactatctcatggcagccacctaaggatgatggaggaagccctgtgataaattatattgttgagaaacaagatacaaggaaagacacgtggggtgttgtctcttccggaagcagtaagacaaagctgaaaatcccacatctgcagaagggctgtgaatatgttttccgagttagagcagagaataagataggtgttggtcctccccttgactccacacctactgttgctaagcataaatttagtcctccgtctcctcctggtaaaccagtggttactgacattactgaaaatgcagcaacagtgtcttggaccctgccaaaatctgatggtggcagtccaataactggctactatatggaacgtcgagaagtaactggcaaatgggtgagggtcaacaaaacacctatcgctgacctgaagttcagagtgactggactctatgaaggaaatacatatgagtttagagtttttgctgaaaatcttgcaggactaagcaaaccatccccaagttctgatccaataaaagcttgccggcccatcaaaccacctggaccacctattaatcctaaactgaaagacaagagcagagaaacagctgatttggtgtggacaaagcctctcagtgatggtggtagccccattctaggatatgtagtggaatgtcagaaacctggcacggcacaatggaacaggattaataaagatgaactcattaggcaatgtgcctttagggtacctggactaattgaaggaaatgagtacagattccgtataaaggcagctaatattgtaggagagggtgagccaagagaactagcagaatctgtgattgcaaaagatatccttcatcctccagaagtagaacttgatgttacttgtcgtgatgttattaccgtgagagtaggccaaactatccgcattctagctcgagtcaaaggcagacctgaaccagacataacttggactaaggaaggcaaagtattggtccgagaaaagagggtggaccttattcaggatctacctcgtgttgagttacaaattaaagaagctgttagagctgatcatggcaagtatatcatctcagctaagaacagcagtggacatgcccaaggttcagccatcgttaacgtccttgacagacctgggccttgccagaatttgaaggttaccaatgtaaccaaagagaactgtacaatttcttgggaaaacccactagataatggtggctcagaaataacaaacttcatagtagaatatcgcaaaccaaaccagaaaggctggtcaattgttgcatcagatgtcactaaacgattaatcaaggccaaccttttagccaacaatgaatactatttccgagtttgtgcagagaataaagtaggtgttgggccaaccatcgaaacaaaaactcccattctggctattaaccctattgacagaccaggtgagcctgaaaaccttcacattgcagataaaggaaagacatttgtctatctaaagtggcggaggcctgactatgatggtggcagtccaaatctgtcatatcatgttgagagaaggcttaagggctccgatgactgggaaagagtgcataaaggaagcattaaagaaactcactacatggttgacagatgtgttgaaaaccagatttatgagttcagagtgcaaacaaagaatgaaggtggggaaagtgactgggtgaagacagaggaagttgttgtgaaagaagacttacaaaaaccagtacttgatctgaaattaagtggggtcctaactgtcaaagcaggggacaccattaggcttgaggcaggggttagaggcaaaccattcccagaagttgcatggaccaaggacaaagacgctacagacttaacaagatcaccaagggtcaagattgatacccgtgctgattcatctaaattttctcttactaaagcaaagcgaagtgatgggggtaaatatgtagttacggcaactaacacggctggcagttttgtggcctatgccactgtcaatgttttagataagcctggtcctgtgagaaatctgaaaattgttgatgtgtccagtgataggtgtactgtttgctgggatccaccagaagatgatggtggctgtgaaatccaaaattatattctagaaaaatgtgagacaaagcgaatggtttggtctacctattctgctactgtcttgacacctggtactacagtaacacgtctcatagaaggaaatgaatatattttcagagtccgtgcagaaaataaaataggcacagggcctccaacagaaagtaaaccagtcatagccaaaaccaagtatgataaacctggtcgccctgatcccccagaagtcactaaagtaagcaaagaagagatgactgtggtttggaatccacctgaatatgatggtggaaagtctataactggatactttttggagaaaaaggaaaagcattcaacacgatgggtccctgtcaacaagagtgcaatccctgagagacgtatgaaagtacagaatctcctcccagaccatgaatatcagttccgtgtcaaggcagaaaatgaaattggaattggagaaccaagcttgccttcaagaccggtggtggcaaaagaccccatagagccacctggtccaccaaccaatttcagagtggttgatacaaccaaacattccataactcttgggtggggaaaaccagtctatgatggtggtgcaccgatcattggatatgttgtggaaatgagaccaaaaatagcagatgcgtctcctgatgaaggctggaaacggtgtaatgctgcagcacagcttgtacgcaaggaattcactgttaccagcttggatgaaaaccaggaatatgagttcagggtgtgtgcccaaaaccaagttggtattgggcgccctgcagagctaaaggaagctatcaaacctaaagaaatactagaacctccggagattgatttggatgccagcatgaggaaactggtcatagtgagagcaggatgccctattcgtctctttgctatagtgagaggacgaccagcccctaaagtcacttggcgaaaagttggcattgataatgtggtcagaaaaggacaagttgatctggttgacactatggccttccttgtcatccccaattctacccgtgatgactcaggaaaatattccttaacacttgtgaacccagcaggagaaaaggctgtattcgtaaatgtcagagtattagacactcctgggcctgtgtctgatttaaaagtttcagatgtcactaaaacatcatgccatgtgtcctgggcccctcctgaaaacgacggtgggagccaagtgacacattatatcgtggagaaacgtgaggcagacagaaagacatggtcgaccgttaccccagaagttaagaaaacaagcttccatgtaaccaatcttgtccctgggaatgagtattacttcagagtaactgctgtcaacgaatatggccctggcgtcccaacagatgtcccaaaaccagtgcttgcatcagatcctctaagtgagccggatcccccaaggaaattagaagtgactgaaatgaccaagaacagtgccaccttagcctggttacctcccctacgtgatggaggtgctaaaatcgatggctacatcactagttacagagaagaagagcagcctgcagatcgctggacagagtactcagtggtaaaagatctgagccttgttgtcactggcctaaaggaaggaaagaaatacaaatttagagtagcggccagaaatgctgttggagtcagtttgccaagagaagctgaaggagtgtatgaagccaaagaacaactgttgccaccaaagatccttatgccagagcaaataactatcaaagctgggaaaaaactccgaattgaagcccatgtgtatggaaagcctcatcccacctgtaaatggaaaaaaggagaagatgaagttgtcacatccagccacctggcagtgcataaagcagacagctcttcaattctgatcataaaagatgtgactaggaaagacagtggttactacagcctcacagcagagaacagttctgggacagacactcagaaaatcaaagttgtagtcatggatgcccccggcccccctcagcctccatttgacatttctgatatagacgctgatgcttgctccctgtcatggcacatccctctggaggacggaggcagtaacatcaccaattatatagtggagaagtgtgatgtaagccgaggtgactgggtcacggctctagcttcagtcacaaaaacttcctgcagggttggaaagctgatcccaggccaggagtacatcttccgggtccgtgctgaaaaccgatttggcatttcagagcctctcacatctccaaagatggttgcgcagttcccatttggtgttcctagtgaaccaaagaatgcacgagtcaccaaagtcaacaaggactgtatttttgttgcttgggacagaccagatagtgatggagggagccccattattggttatctgattgaacgcaaggaaagaaacagtttgctgtgggtgaaagccaatgatactcttgtccggtcaactgaatatccttgtgctggccttgtagaaggtcttgagtattcattcagaatctatgccctaaacaaagctggatccagcccacccagcaaacccacagaatatgtaactgcaagaatgccagttgatcctcctgggaaacctgaggttattgatgtcaccaagagtactgtatctctgatctgggctcgtccaaagcatgatggaggcagtaaaattattggctatttcgtagaagcttgcaaacttcctggtgataaatgggtacggtgcaatactgcacctcaccagattccccaggaagagtacacagctactggcctagaagagaaagctcagtatcaatttagagctattgccaggaccgcggtaaacattagcccaccttctgaaccttctgatccagtgactatcctcgcagaaaatgtccctcccaggatagacctgagtgtggctatgaaatctttgcttactgtgaaagctggaactaatgtctgcttggatgctactgtttttggtaaaccgatgccaacagtttcttggaaaaaagatggcacactgctaaaaccagcagaaggcataaagatggccatgcagcggaatctgtgcaccttggagctattcagcgtgaaccggaaggactcaggagactataccattactgctgaaaattcaagtggttctaaatcagccaccattaagcttaaagtgttagataaaccgggtcctccagcatctgttaaaatcaacaaaatgtattcagatcgtgctatgctttcttgggaaccgcctcttgaagatggaggctcagaaatcaccaactatattgttgacaaacgtgaaacaagcaggcccaactgggctcaagtctctgcaactgtgcctatcaccagctgcagcgtggagaaacttatagagggccatgagtatcagttccgtatttgtgctgaaaataaatatggagtaggcgatccagtcttcactgaaccagcaattgccaaaaacccatatgacccaccaggacgctgtgatcctcctgttattagcaacataaccaaagatcacatgacagtcagctggaagccaccagcagatgatgggggctcacccatcactggctatttgcttgaaaagcgggaaacccaggctgttaactggactaaggtcaacagaaaacctattatagaaagaacattaaaagcaacaggtcttcaagaaggtaccgaatatgagttccgtgttacagctataaataaagctggaccaggcaaacccagtgacgcatccaaggccgcttatgctcgggaccctcagtatcctcctggcccaccggctttccctaaagtatatgatacaactcgcagctctgtgagtctatcttggggcaagccagcctatgacggcggcagccctatcattggttatctcgttgaagtaaaacgggctgactccgataactgggtgaggtgcaacttaccacagaatctacagaaaacccgctttgaggttactggcctgatggaagacacacaatatcaattccgtgtgtatgccgttaataagattggatacagtgaccccagtgatgtgccagataaacactatcccaaggacatcttaattccacctgagggagaacttgatgcggacttaaggaagacactcatattacgtgctggagttactatgagactatatgtaccagtaaaaggacgcccacctccaaagattacttggtctaaaccaaatgtcaatctaagagacaggattggactggacataaagtcaactgactttgacactttcttgcgctgtgaaaatgtgaacaaatatgatgcaggaaaatatatcttaaccctggagaacagctgtggtaaaaaggaatataccattgttgtgaaagtgcttgatactcctgggccacctgtcaatgtgactgttaaggaaatatccaaagactctgcttatgttacctgggagcctcccattattgatggcggaagccccatcataaactatgtggtacaaaaacgtgatgcagagaggaaatcctggtctacagtgacaactgagtgctccaaaacaagcttcagagtacctaatttggaggagggaaaatcctacttcttccgagtgtttgctgaaaatgagtatggcattggtgatcccggtgaaactcgtgatgctgtcaaagcttcccaaactcctggaccagttgtggacctgaaagtgaggtctgtatctaagtcatcctgtagcattggctggaaaaagcctcacagtgatggtggaagtcggattattggatatgtagttgatttcctgactgaagaaaataagtggcaacgagttatgaaatccttaagcctacagtactctgcaaaagatttgactgaagggaaggaatataccttcagagtgagtgctgagaatgaaaatggagaaggaaccccaagcgaaatcactgttgtggcaagggatgatgttgtggctcctgatcttgacttaaagggtctacctgatttgtgctacttggctaaagaaaacagcaacttccggcttaagatccccataaaaggcaagccagctccatcagtctcctggaagaaaggggaagatcctctagcaactgacactagagtcagtgttgagtcatctgcggttaacacaactcttatagtgtacgattgccaaaaatctgatgctggaaaatacacaatcacacttaagaatgttgctggcaccaaggaaggaactatctccataaaggttgttggcaagcctggcatccccactggaccaatcaaatttgatgaagtcacagcagaagccatgaccttaaagtgggctcctccaaaggatgatggaggttctgaaatcaccaactatatcctagagaagagggattctgtgaacaacaagtgggtgacgtgcgcctcagctgtccagaaaaccacctttagagtaaccagacttcatgagggcatggaatataccttcagggtcagtgccgaaaataaatatggtgtaggggaaggcctgaaatcggagccaattgttgcgagacatccatttgatgtgcctgatgctcccccacctcccaatattgtggatgtcagacacgattcagtatctctaacttggactgaccccaagaaaactggtggttctccaattacagggtatcatctcgagttcaaggaaagaaacagccttttgtggaagagagctaacaagactccgataaggatgagagactttaaagtgacaggattaactgaaggtcttgaatatgaattccgagttatggcaatcaatttagcaggtgtgggcaagccaagcctaccatcagagcctgttgtggcactggacccaattgatcctcctggaaaacctgaggttattaacataacaaggaattcagtgactctcatttggactgaacctaaatatgacggtggtcataagttaactggatatatagtggagaagcgagatctaccttcgaagtcttggatgaaagccaaccatgttaatgtcccagaatgtgcctttactgtaactgaccttgttgagggtggaaaatatgaattcagaattagagcaaagaatacagcaggtgctatcagtgctccatcagaaagtacagaaaccattatttgcaaggatgaatacgaggcaccaacaattgtccttgatcccacaataaaagatgggctaacaattaaagcaggggataccattgttttgaatgccattagcattcttggcaaaccccttccaaaatcaagttggtccaaggcaggaaaagacattagaccatcagatatcactcagataacttcaaccccaacatcttccatgcttactatcaagtatgccactagaaaagatgcgggtgaatataccatcactgctaccaatccttttggcacgaaggtggaacatgtgaaggtaacagtccttgatgtacctggtcccccaggtcctgttgaaatcagtaatgtttctgctgaaaaagcaacacttacatggacacctcccttggaagatggcggctcaccaattaagtcctatatacttgaaaagagagaaaccagccgacttttgtggacagtggtttctgaagatattcagtcttgcaggcatgtggcaaccaaacttatccaaggaaatgagtacatcttccgggtctcagctgtaaaccactatggcaaaggagaacctgtacagtctgaacctgtcaaaatggtagacagatttggtccccctggccctcctgaaaaaccagaggtatcaaatgtcactaagaacactgccactgtcagctggaaaaggccagtggatgatggtggcagcgaaattacaggatatcatgtagaaaggagagaaaagaaaagcctgcgatgggtgagagcaataaaaacaccagtttccgatctcaggtgcaaagtaacaggactgcaagaaggaagcacctacgaattccgtgtcagtgcagaaaacagagcaggaattggtccacccagtgaggcttcagattctgttctgatgaaagatgcagcatatcctccaggaccaccttcaaatccgcatgtcactgatactaccaagaaatctgcttctttggcatggggcaagcctcattatgatggtggacttgaaatcactggctatgtcgtggagcatcaaaaagtaggagacgaggcctggataaaagataccacaggaaccgccctcagaatcactcagttcgttgttcctgatcttcagactaaagaaaaatacaacttcagaatcagtgccatcaacgatgcaggtgttggggagccagcggtgattccagatgttgaaatcgtagaacgggagatggctcctgattttgaactagatgccgagcttcgaagaacacttgttgttagagcaggactcagtattaggatatttgtgccaattaaaggtcgtcctgctcctgaagtgacatggaccaaagataacatcaacctgaaaaaccgagccaacattgaaaatacggaatcatttactcttctgattatcccagaatgtaacagatatgataccggtaaatttgtcatgaccattgaaaacccggctgggaagaaaagtggctttgtgaacgtcagagtcttggacacgccaggcccagtcctcaacctgcggcctacagacatcacaaaggacagtgtcaccctgcactgggacctccctctgatagatggaggctcacgtataacaaactacattgtagagaaacgtgaagcaacacggaaatcttattccacagccaccactaagtgccataaatgcacatataaagttaccggcttgtctgaagggtgtgaatatttcttcagagtgatggcagagaatgaatatggaattggtgagccaacagaaactacagagcccgtaaaagcctctgaagcaccatctccaccagacagccttaacatcatggacataactaagagcaccgtcagcctggcatggcctaagcccaaacacgatggtggcagcaagatcactggctatgtgattgaagcccaaagaaaaggctctgaccagtggacccacatcacaaccgtgaaagggttagaatgtgttgtgaggaatctaactgaaggagaggaatataccttccaagtgatggcagtgaacagcgcggggagaagtgcccctagagaaagcagacccgtcattgtcaaggagcagacaatgcttccagagctggatctccgtggcatctatcagaaactggtcattgccaaagctggtgacaacatcaaagttgaaattccagtgctcggtcgaccgaagcccacagtgacatggaaaaaaggagaccaaattcttaaacagacacagagagttaattttgaaaccacagcgacttcaaccattttaaatatcaatgagtgtgtcagaagtgatagtgggccctatccattaacagcaaggaacattgtaggagaggttggtgatgtcatcaccattcaagtccatgatatcccagggccacctactggaccaatcaaatttgatgaagtttcatctgattttgtaaccttctcttgggacccacctgagaacgatggtggtgtaccaataagcaactatgtagtggaaatgcggcagactgacagtactacctgggttgagttagcaaccaccgttatacgtactacctataaagccacccgccttactactggattagagtatcagttccgtgtaaaagctcagaatagatatggagttggaccaggcatcacatcagcatgcatagttgccaactatccatttaaggttcctggacctcctggtacccctcaggtaactgcagttaccaaggattcaatgacaattagctggcatgagccactttctgatggtggaagccccattttaggatatcatgttgaaagaaaagaacgaaatggtattctctggcagactgtgagcaaagctttagtaccaggcaacattttcaaatcaagtggacttacagatggtattgcttatgagttccgggtgattgcagaaaacatggcaggcaaaagtaagccaagcaagccatcagaacctatgttggctctggatcccattgacccacctggaaaaccagtacctctaaatattacaagacacacagtaacacttaaatgggctaagcctgaatatactgggggctttaaaattaccagttatatcgttgaaaagagagaccttcctaatggacggtggctgaaggccaacttcagcaacattttggagaatgaatttacagtcagtggcctaacagaagatgctgcatatgaattccgtgtgatcgccaaaaatgctgcaggtgccatcagtccaccatctgagccatctgatgctatcacttgcagggatgatgttgaggcaccaaagataaaggtggatgttaaatttaaggacacggttatattaaaagcaggtgaagcattcagactggaagctgatgtttcaggccgcccacctccaacaatggaatggagcaaagatggaaaagagctggaaggcacagcaaagttagaaataaaaattgcagatttctctactaatctggtaaacaaagattcaacaagaagggatagtggtgcctatacccttacagcgactaatcctggtggctttgctaaacacattttcaatgtcaaagttcttgacagaccaggcccacctgaaggacctttggctgtaactgaagtgacatcagaaaagtgtgtactatcatggttccctccactggatgatggaggtgccaaaattgatcattacatagtacagaaacgtgaaaccagcagattggcatggacaaatgtagcctcagaagtccaagtaacaaagctaaaggtcactaaactcttgaaaggcaatgaatacatattccgtgtcatggctgtaaataaatatggagtgggagagccactggaatcagagcctgtgcttgcagtgaatccttatggaccccctgatccgcccaaaaaccctgaagtgacaactattactaaagattcgatggttgtctgctggggacatcctgattctgatggtggaagtgaaatcatcaattatattgtggaacggcgtgataaagctggccaacgctggattaaatgcaacaaaaaaactcttactgatttaagatataaagtgtctggactgacagaaggacatgaatatgagttcaggattatggctgaaaatgctgctggaattagtgcaccaagtcctaccagtccattttacaaggcttgtgacactgtgtttaaacctggaccaccaggtaacccacgtgttctggatacaagcagatcatccatttcaatcgcttggaataaacctatctatgatggtggttcagaaatcactgggtatatggttgagattgccctgccagaggaagatgaatggcagattgtcactccaccagcaggactcaaggcaacttcgtatactatcactggcctcacagagaatcaggaatataagatccgcatctatgccatgaattccgaaggacttggggaacctgcccttgttcctggaactccaaaggctgaagacagaatgctgcctccagaaattgaactggatgctgacctgcgcaaagttgttactataagggcctgctgcaccctgagactttttgttcccatcaaaggaaggcctgcacctgaggtgaagtgggcccgggaccatggagaatctttagataaagctagcatcgaatccacaagctcttacaccctgcttattgttggaaatgtaaacagatttgacagtggcaaatatatactaactgtagaaaatagttcaggcagcaagtctgcatttgtcaatgttagagttctcgatacaccaggccccccacaggatctgaaggtaaaagaggtcactaagacatctgtcacactcacatgggacccacctctccttgatggaggttcaaaaatcaagaactatattgttgaaaagcgggaatcaacaagaaaagcatattcaactgttgcaacaaactgccacaagacttcctggaaggtagaccagcttcaagaaggctgtagctactatttcagggttctcgcagaaaatgaatatggcattgggctgcctgctgaaaccgcagaatctgtgaaagcatcagaacgacctcttcctccaggaaaaataactttgatggatgtcacaagaaatagtgtgtcactctcttgggagaaaccagagcatgatggaggcagccgaattctaggctacattgtggagatgcagaccaaaggcagtgacaaatgggccacgtgtgccacagtcaaggtcactgaagccactatcactggattaattcagggtgaagaatactctttccgtgtttcagctcagaatgaaaagggcatcagtgatcctagacaactgagtgtgccagtgatcgccaaagatcttgtcattccaccagccttcaaactcctgttcaatactttcactgtactggcaggtgaagacctaaaagttgatgttccattcattggccgccctaccccagctgtaacctggcataaagataatgtaccactgaagcagacaactagagtaaatgcagagagcacagaaaataattcactactgacaataaaggacgcctgccgagaagatgttggccattatgtggttaaactgactaactcagctggtgaagctattgaaacccttaatgttatcgttcttgacaaaccagggcctccaactggaccagttaaaatggatgaagtgacagctgatagtattactctttcctggggcccacccaagtatgatggtggaagttctatcaataattacattgttgagaaacgggacacttccacaaccacctggcaaattgtatcagctacagttgcaaggacaacaataaaggcttgcagactgaagactggatgtgaatatcagtttagaattgcagctgaaaacagatatgggaagagtacctacctcaattcagagcctactgtagcccaatatccattcaaagttcctggtcctcctggcactccagttgtcacactgtcctccagggacagcatggaagtacaatggaatgagccaatcagtgatggaggaagtagagtcattggctatcatctagaacgcaaggaaagaaatagcatcctctgggttaagttgaataaaacacctattcctcaaaccaagtttaagacaactggccttgaagaaggtgttgaatatgaatttagagtctctgcagagaacatcgtgggcattggcaagccgagtaaagtatcagaatgttatgtggctcgtgacccatgtgatccaccaggacggccagaggcaatcattgtcacaaggaattctgtgactcttcagtggaagaaacccacctatgacggtggaagcaagatcactggttatattgttgagaagaaagaattacctgagggccgttggatgaaagccagttttacaaatattattgacactcattttgaagtaactggcctagttgaagatcacagatatgagttccgggttatagcccgaaatgccgcaggagtgtttagtgagccttcagaaagcacaggagcaataacagctagagatgaggtagatccaccacgaataagtatggatccaaaatacaaagacacaatcgtggttcatgctggtgaatcattcaaggttgatgcagatatttatggcaaaccaataccaaccattcagtggataaaaggtgatcaggagctttcaaacacagctcgattagaaataaagagcaccgactttgccaccagtctcagtgtaaaagatgcagtacgtgtcgacagtggaaattacatactgaaggccaaaaatgttgcaggagaaagatcagttactgtgaatgtcaaggttcttgacagaccagggccacctgaaggacctgttgttatctcaggagttacagcagaaaaatgcacactagcttggaaacccccacttcaggatggtgggagtgacatcataaattatattgtggaaaggagagaaaccagccgcttagtttggactgtggttgatgccaatgtgcagactctcagctgcaaggttactaagcttcttgaaggcaatgaatatactttccgtataatggcagtaaacaaatatggtgttggtgaacctcttgaatctgagccagtagttgccaagaatccatttgtagtaccagatgcaccaaaagctccagaagtcacaacagtgaccaaggactcaatgattgttgtatgggaaagaccagcatctgatggtggtagtgaaattcttggatatgttcttgagaaacgggataaagaaggcattagatggacaagatgccataagcgtctgattggagagttgcgcctgagagtaactggactcatagaaaatcacgattatgagttcagagtttctgctgagaatgctgctggacttagtgaaccaagccctccttctgcttaccaaaaggcttgtgatcctatttataaaccaggacccccaaacaaccccaaagtcatagacataaccagatcttcagtattcctttcttggagcaaaccaatatatgatggtggctgtgaaattcaaggatacattgttgaaaaatgtgatgtgagtgttggtgaatggacaatgtgcactccaccaacaggaattaataaaacaaacatagaagtagagaagctgttggaaaagcatgaatacaacttccgtatctgtgctattaataaagctggagttggagaacatgctgacgtccctggacctattatagttgaagaaaaattagaagcaccagacattgatcttgacctagaactaaggaaaatcataaatataagggcaggtggctccttaaggttatttgttcctataaaaggtcgtcctacaccagaagttaaatggggaaaggtggatggtgaaatccgagatgcagctataattgatgtcactagcagtttcacctctcttgttcttgacaatgtcaaccgatatgatagtggaaaatatacgcttacattagaaaacagcagtggaacaaagtctgcctttgttactgtgagagttctggacacgccaagtccacctgttaacctgaaagtcacagaaatcaccaaagactcagtatcaattacatgggaacctcctttgttggatgggggatccaaaataaaaaattacattgttgagaaacgtgaagccacaagaaaatcatatgctgctgttgtaactaactgccataagaattcttggaaaatcgatcagctccaagaaggttgcagttattactttagagtcacagctgagaatgagtatggtattggccttcctgcccagactgctgatccaattaaggttgcagaagtgccacaacctcctggaaaaataactgtggatgatgtcaccagaaacagtgtctctctgagttggacaaaacctgaacatgatggtggcagtaaaatcattcagtatattgtggaaatgcaagctaaacacagtgagaaatggtcagagtgtgctcgagtaaagtctcttcaggcagtaattaccaacctaactcaaggggaagaatatctttttagagttgttgctgtaaatgaaaaggggagaagtgatcctcggtcccttgcagttccaatagttgccaaagatctggtaattgagccagatgtaaaacctgcattcagtagttacagtgtacaggttggccaagatttgaaaatagaagtgccaatttctggacgtcctaagccaaccattacctggactaaagatggtctcccactgaagcagaccacaagaatcaatgttaccgattcactggatctcaccacactcagtattaaagaaactcataaggatgatggtggacaatatggaatcacagttgccaatgttgttggtcagaagacagcatccatcgaaattgtaactctagataaacctgatcctccaaaaggacctgttaaatttgatgacgtcagtgctgaaagtattacattatcttggaaccctccattatatacagggggctgccaaatcaccaactacattgttcagaaaagagatacaaccaccacagtatgggatgttgtttctgctactgttgctagaactacactcaaagtgaccaaactgaaaactggtacagaataccaatttagaatatttgccgaaaacagatatggacaaagctttgccttagagtctgatccaattgtagctcaatatccctacaaagaaccaggccctccaggtacaccatttgccacagccatttccaaagactccatggtcatacagtggcatgaaccagtcaacaatggtggaagccccgtcataggttaccacctggagagaaaagaaagaaacagtattttgtggacaaaggtcaacaaaactattattcatgacacccaattcaaagcacagaatcttgaagaaggcattgaatatgaattcagagtgtatgctgaaaatattgttggtgtaggcaaagcaagcaagaattctgaatgctatgtagccagagatccctgtgacccaccaggaaccccagaaccaataatggttaaaagaaatgaaatcactttacagtggaccaaacctgtgtatgatggtggaagtatgattacaggctacattgtagagaaacgtgatttgcctgatggtcgttggatgaaagctagctttacaaatgtcattgaaactcaatttactgtgtcaggtcttactgaagatcaaagatatgaattcagagtcattgcaaagaatgcagctggtgcaataagtaaaccctctgacagtactggaccaataactgccaaggatgaggttgaactcccaagaatttcaatggatccaaaattcagagacacaattgtggtaaatgctggagaaacattcagacttgaggctgatgtccatggaaagcccctacctaccattgagtggttaagaggagataaggaaattgaagaatctgctagatgtgaaataaagaacacagatttcaaggctttacttattgtaaaagatgcaattagaattgatggtgggcagtatattttaagagcttccaatgttgcaggttctaagtcattcccagtaaatgtaaaagtattagatagaccaggacctccagaagggccagtccaggttactggagtcacttctgaaaaatgctctttaacatggtctccaccacttcaagatggtggcagtgacatttctcactatgttgttgaaaagcgagaaaccagtcgacttgcctggactgttgttgcttcagaagttgtgaccaattctctgaaagttaccaaactcttagaaggtaatgaatatgttttccgtataatggctgtcaacaaatatggtgttggagagcctttggaatctgcaccagtactaatgaaaaatccatttgtgcttcctggaccaccaaaaagcttggaagtcacaaatattgccaaagactccatgaccgtctgttggaaccgtccagatagtgatggtggaagtgagattattggttacattgtagagaaaagagacagaagtggcattcgatggataaaatgtaataaacgccgcattacagatttgcgtctaagagtgacaggattaacagaagatcatgagtatgaattcagggtctctgcagaaaatgctgctggagttggggaaccaagtccagctacagtttattataaagcctgtgatcctgtgttcaaacctggcccacctaccaatgcacacattgtagacaccactaaaaattcaatcacacttgcctggggtaaacccatctatgatggcggcagtgagatcttgggatatgtagtagaaatctgtaaagcagatgaagaagaatggcaaatagttactccacagactggcctgagagtcactcgatttgaaatttcaaaactcactgaacaccaagagtataaaatacgagtctgtgccctcaacaaagttggtttaggtgaggctacatcagttcctggtactgtgaaaccagaagataaacttgaagcacctgaacttgaccttgactccgaattaagaaaaggaattgttgtaagagctggtggatctgccagaattcacattccattcaaaggtcgtccaacgcctgagatcacttggtctcgagaggaaggtgaattcacagataaggtccaaattgaaaagggagtaaactatacccaactatcaatagataactgtgatagaaatgatgctggaaaatacattcttaagttggaaaacagcagtggatcaaagtctgcttttgtaactgtgaaagttcttgacactccaggaccaccacagaatttggcagtcaaagaagtgagaaaagattctgccttcctggtatgggagccacccatcattgatggaggggcaaaggtcaagaactatgtgattgacaaacgtgagtcaaccagaaaagcgtatgctaatgtgagtagtaaatgcagcaaaacaagttttaaagtggaaaaccttacagaaggagccatttattacttcagagtcatggctgaaaatgaatttggagttggtgttccagtggaaactgttgatgccgtgaaagctgctgaacctccttccccaccaggaaaggttacactcactgatgtgtcccagaccagtgcatcacttatgtgggagaaacctgaacatgatggcggtagcagagtcctggggtacgttgttgaaatgcagcccaaaggaactgaaaaatggagcattgtggctgaatccaaagtctgtaatgcagttgttactggtttgagttctggacaagaatatcagttccgtgtcaaggcttataatgagaaaggaaaaagcgatccaagagtgttgggtgttcctgtcatagccaaggacttgactatacagcctagtttaaagttaccatttaacacatatagtatccaagctggagaagatcttaaaatagaaattccagttataggccgaccaagacctaacatttcttgggtcaaagatggtgagcctcttaaacagacaacaagagtaaacgttgaagaaacagctacctcaactgttttgcacattaaagaaggtaacaaagatgactttggaaaatacaccgtaacggcaacaaatagtgcaggcacagcaacagaaaatctcagtgttatcgttttagaaaagcctggacctccagttggcccagttcggtttgatgaagttagtgcagactttgtagtcatatcttgggaacctccagcctatactggtggctgccaaataagcaactacattgtagagaagcgagatacaaccaccaccacttggcacatggtatcagcaacagttgcaagaacaacaattaaaataaccaaactgaaaacaggcacggagtaccagtttagaatttttgctgaaaacaggtatggaaaaagtgccccactggattctaaggcagttattgtacaatatccatttaaagaacctggaccacctggaactccttttgtgacatcaatctcaaaagatcagatgcttgtgcaatggcatgagccagtgaatgatggaggcaccaaaattattggctaccatcttgaacagaaagaaaagaacagtattttatgggtcaagttaaataagacccccattcaggacaccaaattcaaaacaactgggcttgatgagggccttgagtatgagttcaaagtttctgctgaaaatattgttggcattggcaagcctagcaaagtgtcagaatgctttgttgctcgtgatccatgtgacccacctggtcgccctgaagccattgttattacaagaaacaatgtcacactgaaatggaagaaacctgcctatgatggtggtagcaaaataacaggttatattgtagaaaagaaagatctacctgatggccgctggatgaaagccagctttaccaacgtattagaaactgaatttacagtgagtggacttgtagaagaccaaagatatgaatttagagtaattgcaagaaatgcagctggaaactttagtgaaccatctgatagtagtggtgccattactgcaagagatgaaattgatgcaccaaatgcctctctggatccaaaatataaagatgtcatcgttgttcatgcaggagagacttttgttcttgaagccgacatccgtggcaaacctatacctgatgttgtttggtcaaaagatggaaaagaacttgaagaaacagctgctagaatggaaattaaatctactattcagaaaacaactcttgttgtcaaagactgtatacggactgatggaggacaatatattctgaaactcagcaatgttggtggtacaaagtctatacccatcactgtaaaggtacttgacaggccagggcctcctgaagggcctctgaaagttactggagttactgcggaaaaatgttacctggcatggaacccacctttgcaagatggtggtgctaatatttcacattacatcattgaaaagagggagacaagccgactctcttggacccaggtttcaactgaggtacaggcccttaactacaaagttactaaacttcttcctggtaatgagtacattttccgtgtcatggctgtgaataaatatggaattggagagcccttggaatctgggcctgttacggcctgtaatccttataagccaccaggtcctccctcaacacctgaagtctcagcaatcaccaaagattctatggtagtaacatgggcacgcccagtagacgacggaggtaccgaaattgagggctacattcttgaaaaacgagataaggaaggcgttagatggaccaagtgcaacaagaaaacattaacggatctgcggctcagggtaactggtcttaccgaaggccattcctatgaattcagagttgctgctgaaaatgcagctggtgtgggagaacctagtgagccatctgttttctaccgtgcgtgtgatgccttgtatccaccaggtcccccaagcaatccaaaagtgacggacacttccagatcttctgtctccctggcatggagtaagccaatttatgatggtggcgcacctgttaaaggctatgttgtagaggtcaaagaagctgctgcggatgaatggacaacctgcactccaccaacaggattacaaggaaagcagttcacagtgaccaagcttaaagaaaacactgaatataacttccgtatttgtgccatcaattctgaaggtgtaggtgaacctgcaactctacctggctcagtggttgctcaggagaggatagagccaccagaaatagaactcgatgctgatctcagaaaggtggtcgttctgcgtgcaagtgctactttacgcttatttgtcactatcaaaggtcgaccagaacccgaagttaaatgggaaaaggcagaaggcattctcactgacagggctcagatagaggtgaccagctcatttacaatgttggtgattgataatgttaccagatttgacagtggtcggtataatctgacattagaaaataatagtggctccaaaacagcttttgttaacgtcagagttcttgactcaccaagtgcccctgtgaatttgaccataagagaagtgaagaaagactcagtgacgttgtcctgggaaccaccacttattgatggtggagctaagattacaaactacattgtcgaaaaacgagaaactacaagaaaagcctatgctaccattacaaataattgcactaaaactactttcagaattgaaaatctacaagaaggatgttcttactacttccgagtcttggcttccaatgaatatgggattggtttgccagctgaaacaacagaacccgttaaagtgtctgaaccacccctcccacctggaagagtaactcttgttgatgtgacccgtaatacagctacaattaagtgggagaaaccagaaagtgatggtggcagcaaaattactggttatgtggttgaaatgcagactaaagggagtgaaaagtggagcacctgcacacaagttaagactctagaagcaactatatctggcttaactgcaggagaagagtatgtcttcagggtagctgcagttaacgaaaagggaagaagtgatccaagacaacttggagtgccagtaattgcaagggatattgaaataaagccttcagttgagcttcctttccatactttcaatgtaaaggctagagaacaacttaagattgatgtgccattcaaaggaagacctcaagctactgtgaactggagaaaagatggtcagactcttaaagagacaactagagtcaatgtttcttcttcaaagactgtaacatcactatctattaaggaagcttcaaaggaagatgttggaacttatgaattatgtgtttcaaacagtgctggatccataacagttcctattactataattgtccttgacagaccaggacctccaggtcctatacgtattgatgaggttagttgtgacagcataaccatttcttggaatcctccagaatatgatggtggctgccaaattagcaattacattgttgaaaagaaagaaaccacctctacaacatggcacatagtttcacaagcagttgcaagaacatccattaaaatagttcgcctgacaacaggaagtgagtatcagttccgtgtttgtgcagaaaaccgctatggaaagagctcctacagtgaatcttcagctgttgttgcagagtatccattcagtcccccaggtcctcctggtactcctaaagttgtgcatgccacaaaatctaccatgcttgtaacctggcaagtgccagttaatgatggaggaagtcgagtaattggctatcatcttgagtataaagaaagaagcagcattctttggtcaaaagcaaataaaatcctcattgctgatactcaaatgaaagtctccggccttgatgaaggactgatgtatgagtatcgtgtatatgctgaaaatattgctggaattggtaaatgcagtaaatcttgtgaaccagtccctgcaagagatccttgtgaccctcctggacaacctgaagtcacaaatatcacaagaaaatcagtgtcacttaaatggtctaaaccacattatgatggtggagctaagatcacaggatacattgttgaacgcagagaactaccagatggccggtggctgaagtgcaattatactaatatacaagaaacatactttgaagtaactgaacttactgaagatcagcgttatgaattccgggtttttgcaaggaatgctgctgactcagttagtgagccatctgaatccactgggcctattatagttaaagatgatgttgagcctccaagagttatgatggatgtcaagttccgagacgttattgttgtcaaagctggagaggtccttaagataaatgcagacattgcagggcgacctctgccagtaatttcctgggccaaggatggtatagaaattgaagaaagagcaagaacagaaatcatctcaacagacaatcatactttgttaacagttaaagactgtataagacgagacactgggcaatatgtactaacactgaagaatgttgccggcactcggtctgtggccgttaattgcaaagtacttgataagcctggtccaccagcaggaccacttgaaataaatggcctcactgctgagaaatgctctctttcctggggacgtccccaagaagatggtggtgcagatatcgactattacatcgtagaaaaacgtgaaacaagccaccttgcatggacaatatgtgaaggagagttacagatgacatcctgtaaagtaaccaagttactcaaaggcaatgaatatatatttagagtaactggtgttaataaatatggtgttggtgagcccctagagagtgtagctataaaggcactagatccatttacagttccaagtccacccacgtctttggaaattacttctgtgaccaaagaatctatgacactttgctggtcaagacccgagagtgatggaggtagtgaaatatctggatatataattgaaaggcgagagaaaaatagcctaagatgggtgcgtgtaaacaaaaaaccagtttatgatctaagagtgaaatcaacaggacttcgggaaggatgtgaatatgaatatcgtgtttatgcagaaaatgctgctggcctaagtcttccaagtgaaacctctcccttaattagggcagaagatccagtgttcctaccatctcctccatccaaacccaaaattgtggactcaggcaagacaactataactattgcctgggttaagccgctgtttgatggtggggccccgataactggatatactgtagaatacaaaaaatctgatgacactgactggaaaacttccattcagagcttacgagggacagaatatacaataagcggactaacaacaggagctgaatatgttttcagagtaaaatctgtcaataaggttggtgctagtgaccccagtgatagctctgaccctcagatagcaaaggaaagagaagaagaacctttatttgatattgacagtgaaatgaggaagaccttgattgtcaaggctggtgcctcatttaccatgactgtgcctttccgaggaagaccagtacccaatgtcttgtggagtaagccagacactgacctccgtactagagcttatgttgataccacagactctcgtacatcactgaccattgaaaatgccaacagaaatgactctggaaagtacacattaacaattcagaatgttttgagtgctgcttcactgaccttagttgtcaaagttttagataccccaggtcctccaaccaacattactgtgcaagatgtaaccaaagagtctgcagtgttatcctgggatgttcctgaaaacgatggtggagcaccagtgaagaattaccacatagaaaaacgtgaggccagcaagaaagcatgggtctctgtgaccaacaactgtaaccgcctctcctacaaagttaccaatttacaagaaggagctatctattacttcagagtctctggagaaaatgagtttggtgttggtataccagctgaaacaaaggaaggagtaaaaataacagaaaaaccaagcccacctgaaaaacttggagtaacaagtatatccaaagacagtgtttccctgacctggctgaagcctgaacatgatggcggaagcagaattgtacactatgtcgttgaagcactagaaaaaggacagaaaaactgggttaaatgtgcagtggcaaagtcaacccatcacgttgtttccggtctgagagagaattctgaatactttttccgagtgtttgctgaaaatcaagctggcctgagtgacccgagagagcttctgcttcctgttcttattaaggagcaactagaaccacctgaaattgatatgaagaatttcccaagtcacactgtatatgttagagctggttcaaaccttaaagttgacattccaatctctggaaaaccacttcccaaagtgaccttatcaagagatggtgtcccccttaaggcaaccatgagatttaataccgaaattactgctgagaacctgaccatcaatctcaaagaaagtgttacagctgacgctgggagatatgaaatcactgctgccaactccagtggtacaaccaaagctttcattaacattgttgtgctagacaggcctggtcctccaactggccctgttgttattagtgatataactgaagaaagtgtgactctcaaatgggagccacctaagtatgacggtggaagtcaagttaccaactacattctactcaaaagagaaacaagtactgcagtgtggactgaagtgtctgcaacagttgcaagaaccatgatgaaagtcatgaaactgaccacaggagaagaataccaattccgcatcaaggcagaaaaccgctttggcatcagtgatcatatagattcagcttgtgtgactgtcaaactaccatacacaacacctggaccaccatctacaccatgggtcactaatgttactcgagaaagcatcactgtgggctggcatgaaccagtgtcaaatggaggcagtgcagtcgtaggctatcacctggaaatgaaagacagaaacagtattttatggcaaaaagccaacaaactggtcatccgcacaactcacttcaaagtcacaacaatcagtgctggacttatttatgaattcagggtgtatgcagaaaatgctgctggagttggaaaacctagccatccttctgaaccagtcttggcaattgatgcttgtgaacccccaagaaatgttcgtatcactgatatttcaaagaactctgtcagcctttcatggcaacaaccagctttcgatggaggtagcaagattacaggctacattgttgagagacgtgaccttccagatggcagatggaccaaggccagcttcaccaatgttactgaaactcaattcatcatctctggcttgactcagaattcccagtatgaattccgtgtctttgctaggaatgctgttggttccattagcaatccatctgaggttgtagggcccattacttgcatcgattcttatggtggtcctgtaattgatttgcctctagaatatacagaagttgtcaaatacagagcaggtacatctgtgaagctcagagctggcatttctggcaaacctgcgcctactattgagtggtataaagatgataaagaattacaaaccaatgcactggtgtgtgttgaaaataccacggacctcgcatctatactcatcaaagatgccgatcgccttaatagtggatgctatgaattaaaactaaggaatgccatgggctcagcctcagccaccatcagagtacagatccttgacaaaccaggcccacctggtggaccaattgaatttaagactgtaactgctgagaagatcacccttctctggcggcctccagctgatgatggtggtgcaaaaatcactcactacattgtggaaaagcgtgagacaagccgcgttgtgtggtctatggtgtctgaacatttggaagagtgcatcattacaaccaccaaaattatcaaaggaaatgaatacatcttccgggtccgagccgtgaacaaatatggaattggcgagccactggaatctgattccgttgtagccaagaacgcatttgttacacctgggccaccaggcataccagaagtgacaaagattaccaagaattcgatgactgttgtatggagcaggccaattgcagatggcggtagtgatataagtggctatttccttgaaaaacgagacaagaagagcctaggatggtttaaagtactaaaagagactatccgtgacaccagacaaaaagtaacaggactcacagaaaacagtgactatcaatacagagtttgtgctgtaaacgctgctggacagggtccattttctgaaccatctgaattctacaaagctgctgatcctattgatcctccaggtccacctgctaagataagaatcgcagattcaaccaagtcatccatcacccttggctggagtaagcctgtctatgatgggggcagtgctgttactgggtatgttgtcgagataagacaaggagaggaagaggaatggactactgtctctaccaaaggagaggtcagaactacagaatatgtggtatccaacctgaaacctggagtcaattactacttccgggtatctgctgtaaactgtgctggacaaggagaacctatagaaatgaatgaacctgtacaagctaaagatatacttgaggcaccagagattgacctggatgtggctctcagaacttctgttattgccaaagctggtgaagatgtacaagtgttgattccctttaaaggcagacctccacctactgtcacatggagaaaagatgagaagaatcttggcagtgatgccagatacagcattgaaaacactgattcatcctcattactcaccattcctcaagttactcgcaatgatacaggaaaatatattctcacaatagaaaatggagttggtgaacctaagtcttcaactgtgagtgttaaagtgcttgacacaccagctgcctgccagaaactacaggttaaacatgtttctcgaggcacagtcactttgctctgggatcctcctctcattgatggaggatctccaataattaattatgtcattgaaaagagagatgccaccaagagaacatggtctgtcgtgtcacacaaatgttctagcacatccttcaagctaatagatttgtcggagaagactccattcttcttcagagttcttgcagaaaatgaaattggaattggggaaccctgtgaaactacagagccagtgaaggctgctgaagtaccagctcctatacgtgatctctcaatgaaagactcaacaaagacatctgtcatcctcagctggaccaaacctgactttgatggtggtagcgtcatcacagaatatgttgtagaaaggaaaggtaaaggtgaacagacgtggtcccacgctggcataagtaagacatgtgaaattgaggttagccaacttaaggagcagtcagtcctggagttcagagtgtttgccaaaaatgagaaaggactgagtgatcctgtcactattgggccaattacagtgaaagaacttattattacacctgaagttgacctgtcagatatccctggggcacaagtcactgtgagaattgggcacaatgtgcaccttgaattaccttataagggaaaacccaaaccatccatcagttggctgaaagatggcttgccactgaaagaaagtgaatttgttcgcttcagtaaaactgaaaacaaaattactttgagtattaagaatgccaagaaggagcatggaggaaaatacactgttattcttgataatgcagtgtgtagaattgcagtccccattacagtcatcacccttggcccaccatcaaagcccaaaggacccattcgatttgatgaaatcaaggctgatagtgtcatcctgtcatgggatgtacctgaagataatggaggaggagaaattacttgttacagcatcgagaagcgggaaacttcacaaactaactggaagatggtgtgttcaagtgttgccagaacgactttcaaagttcctaatctagtcaaagatgctgagtaccagtttagagtgagagcagaaaacagatacggagtcagccaaccacttgtctcaagcattattgtggcaaaacaccagttcaggattcctggtcccccaggaaagccagttatatacaatgtgacttctgatggcatgtcactaacttgggatgctccagtttatgatggtggttcagaagttactggattccatgttgaaaagaaagaaagaaatagcatcctctggcaaaaagttaatacatcaccaatctctggaagagaatatagagccactggactggtagaaggtctggattaccaattccgtgtatatgctgaaaattctgctggcctaagctcacctagtgacccaagcaaatttaccttagctgtttctccagtagacccacctggcactcctgactacattgatgtcacccgggaaaccatcacacttaaatggaacccaccattgcgtgatggaggcagtaagattgtgggctatagcattgagaaacggcaaggaaatgaacgctgggtgagatgcaactttactgacgtcagtgaatgtcagtacacagttacaggactcagtcctggggatcgctatgagttcagaataattgcaagaaatgctgttggaactataagcccgccctcacagtcttctggcattattatgacaagagatgaaaatgttccaccaatagtagagtttggccctgaatactttgatggtctcattattaagtccggagagagccttagaattaaagctttggtacaaggaagaccagtgcctcgagtaacttggttcaaagatggagtggaaatcgaaaagaggatgaatatggaaataaccgacgtacttggatccaccagcctatttgttagagatgctactcgggaccatcgtggtgtatacacagtggaagccaaaaatgcatctggttctgcaaaagcagaaattaaagtgaaagtacaagatacaccaggaaaagtagttgggccaataagattcaccaatattactggggagaagatgactctgtggtgggatgccccactcaatgacggttgtgctcccataacccactacatcattgaaaaacgggaaaccagcagacttgcctgggcactaattgaggataaatgtgaagcccaaagttacactgccattaaactaataaacggcaatgaataccaattccgtgtttctgcagttaacaagtttggtgttggcaggccacttgattctgatccagtggttgctcaaatacaatatactgttcctgatgcccctggcattccagaacctagcaacataacaggcaacagcattaccctgacatgggcaaggccagaatcagatggtggcagtgaaattcaacagtatatccttgaaagaagagaaaagaaaagcacaagatgggtaaaagtgatcagcaaacgaccaatctctgaaacaagattcaaagtcactggtctgacagaaggcaatgagtatgaattccatgtcatggctgaaaatgctgcaggagttggacctgcaagtggcatctcaagactcattaaatgtagagagcccgtcaacccaccaggtcctcccacagtggtcaaagtaacagacacatcaaagacaactgtgagcttagaatggtccaaaccagtgtttgatggtggcatggaaataattgggtatattattgaaatgtgtaaggccgacttaggagactggcacaaggtgaatgcagaggcatgtgtgaaaacaagatatacagtcactgatctacaagcaggtgaagaatacaaattccgagttagtgctatcaatggtgctggaaaaggcgacagctgtgaagtgactggcacaattaaagcagttgaccggttaacagctcctgagttagacatagatgcaaacttcaaacagactcatgttgttagagctggggccagtattcgcctcttcattgcctaccaaggtagacctactcctacagctgtgtggagcaaaccagactctaaccttagccttcgggctgatatccatacaacagattccttcagcaccctcactgtggaaaactgcaacagaaatgatgcagggaaatatacccttactgtggaaaacaacagtggtagtaagtcaatcacattcaccgtgaaagtgctagacactccaggcccacctggcccaattaccttcaaagatgtgacccggggatctgctacattgatgtgggatgcccctcttcttgacggtggtgcccgaatccatcattatgtggtagagaaacgagaggcaagtcgccgtagttggcaggttatcagtgaaaaatgcactcgtcagatcttcaaggtcaatgacctggccgaaggtgttccgtactatttccgtgtttctgcagtaaatgagtatggtgttggtgagccctatgaaatgccagaaccaattgtagccacagaacagcctgctccacctaggagacttgatgttgttgatactagcaaatcctccgcagtcttagcttggcttaaacctgaccacgatggaggcagccggatcactggctacctgcttgaaatgagacaaaagggatctgacttctgggttgaagctggtcacaccaaacagctaactttcacagtagagcgtcttgttgagaaaactgaatatgaattccgtgtgaaggccaagaatgatgctggctatagtgaacccagagaagccttctcttctgtcatcattaaggagcctcaaatcgagcccactgctgacctcactggaattaccaatcagcttataacttgcaaagcaggaagcccatttaccattgacgtaccaatcagtggtcgtcctgcccccaaagtaacatggaaactggaagaaatgagacttaaagagacagatcgagtgagcattacaacaacaaaagacagaaccacactgactgtaaaggacagcatgagaggtgactctggaagatacttcttgaccctggaaaatacagctggtgttaaaacatttagcgtcacagttgtggtcattggaaggccaggtccagtaaccggccccattgaggtctcatctgtctcagctgaatcgtgtgtcctgtcatggggagaacctaaagatggaggaggcactgaaattactaattacatagttgaaaagcgtgaatcgggtacaacagcttggcagcttgtcaattccagtgtcaagcgcactcaaattaaagtcactcatctcacaaaatacatggaatattctttccgtgtcagttcagagaacagatttggtgtcagcaaacctctagaatcagcaccaataattgctgaacatccatttgtcccaccaagcgctcctaccagacctgaggtctaccatgtgtctgccaatgccatgtctattcgttgggaagaaccctaccacgatggtggcagtaaaatcattggctactgggttgagaagaaagaacgtaatacaattctttgggtgaaagaaaacaaagtgccatgcttagagtgcaactacaaagtaactggtttagtagaaggactggaatatcagttcagaacttatgcactcaatgctgcaggtgttagcaaggccagcgaagcttcaagacctataatggctcaaaatccagttgatgcaccaggcagaccagaggtgacagatgtcacaagatcaacagtatcactgatttggtctgccccagcgtatgatggaggcagcaaggttgtgggctacatcatagagcgtaagccagtcagtgaggtaggagatggtcgctggctgaagtgcaactacaccattgtatctgacaatttcttcaccgtgactgctctcagtgaaggagacacttatgagttccgtgtgttagccaagaatgcagcaggcgtaattagcaaagggtctgaatctacaggccctgtcacttgccgagatgaatacgctccacccaaagccgaactggatgcccgattacacggtgatctggttaccatcagagcaggttctgatcttgttctggatgctgcagttggtggcaaacctgaacccaaaattatctggaccaaaggagacaaggagctagatctctgtgaaaaagtctctttgcagtatactggcaaacgagcaactgctgtgatcaagttctgtgacagaagtgacagtggaaaatacactttaacagtgaaaaatgccagcgggaccaaggccgtgtctgtcatggtcaaagtgcttgattcccctggcccatgtggaaagctcaccgtcagcagagtaacacaggagaagtgcactttagcctggagccttccgcaggaagacggaggagcagaaatcactcactacatcgtggaaagacgcgagactagcaggctcaactgggtgattgttgaaggcgaatgcccaaccctatcctatgtcgttaccaggctcatcaagaacaatgagtacatattccgagtgagggcagtaaacaaatatggccctggtgtgcctgttgaatcagagccaattgtagccagaaactcattcactattccatcaccacccggcatacctgaagaagttgggactggcaaagagcatatcatcattcagtggacaaaacctgaatctgatggtggcaatgaaatcagcaactacctagtagacaaacgtgagaagaagagcctgcgctggacacgtgtcaacaaagactatgtggtgtatgataccaggctgaaggtgaccagcctgatggagggttgtgattaccagttccgggtgaccgcagtgaatgcagctggtaacagtgagcccagcgaagcttccaacttcatctcatgcagagaaccatcatatacccctggaccaccttctgctccaagagttgtggataccaccaaacacagcattagtttggcatggaccaaacccatgtacgatggtggtactgacattgtaggatatgttctggaaatgcaagagaaggacactgatcagtggtaccgagtgcataccaatgccacaataagaaatactgaattcactgtgccagaccttaaaatgggccagaaatattccttcagagttgctgccgtgaacgtgaagggtatgagcgaatacagcgaatcaattgctgaaattgagcccgtggaaagaatagaaataccagatcttgagcttgcagatgatctaaagaagactgtgaccatcagggctggggcctccttgcgcttgatggtgtctgtatctggaagaccacctcctgtcataacgtggagcaagcagggcattgaccttgcaagccgggcaattattgacaccactgagagctactcattgctaatagtggacaaagttaatcggtacgatgctggaaaatacacaattgaagctgaaaaccaatctggcaagaaatcagcaacagtccttgttaaagtctatgatactcctggtccctgtccttcagtgaaagttaaggaagtatcaagagattctgtgactataacttgggaaattcccacgattgatggtggagctccagtcaacaattacatcgttgagaagcgtgaagctgctatgagagcattcaaaacagtaactaccaaatgcagcaagacactttacagaatttctggacttgtagaaggaaccatgtactatttcagagtgctgccagaaaatatttatggcattggagaaccttgtgaaacatctgatgcagtactggtctcagaagtgcctttggtgcctgcaaagctagaagtggtcgatgtcaccaaatccactgttacccttgcctgggaaaaaccactctacgatggtggtagccgactcactggatatgttctcgaggcctgcaaagctggcacagagagatggatgaaggttgtcaccttaaaacccacagtcctagagcacactgttacttccttaaatgaaggtgaacaatacttatttagaataagggcacaaaatgagaaaggtgtgtcagaaccaagagagactgtcacagccgtgactgtacaagacctcagagtgttgccaacaatcgatctttctacaatgcctcagaagaccatccatgtcccagctggcagaccagtagagctggtgatacctattgctggccgtccacctcctgctgcttcctggttctttgctggttctaaactgagagaatcagagcgtgtcacagttgaaactcacactaaagtagctaaattaaccatccgtgaaaccactatcagagatactggagaatacacacttgaattgaagaatgttaccggaactacttcagaaaccattaaagttatcattcttgacaagcctggtccaccaacaggacctattaagattgatgaaattgatgctacatcaattaccatttcctgggaaccacctgaattggacggtggtgctccactgagtggttatgtggtagaacaacgtgacgctcatcgtccaggatggctgcccgtttctgaatcagtgactaggtccacgtttaagtttaccagactcaccgaaggaaatgagtatgtgttccgtgtggctgcaacaaaccgcttcgggattggctcttacttgcagtctgaggtcatagagtgtcgcagcagcatccgtattcctggacccccagaaacattacagatatttgatgtttcccgtgatggcatgacacttacttggtacccaccagaggatgacggtggctcccaagtgactggatatattgtggagcgcaaagaagtgagagcagatcgatgggtccgtgtaaataaagtacctgtgacaatgacacggtaccgctccactggccttactgaaggcttagaatatgaacaccgtgtcacagccattaatgcaagagggtctgggaaaccaagtcgtccttccaaacccatcgttgccatggatccaattgctcctccaggaaagccacaaaacccaagagttactgatacaacaaggacatcagtctccctggcctggagtgttccagaagatgaaggaggatctaaagtcacaggctacttgattgaaatgcaaaaagtagatcaacatgaatggaccaagtgtaacaccactccaaccaagattcgagagtatactctaacacacctacctcagggtgcagaatacaggttccgcgtcctagcttgtaatgctggtggacctggtgagcctgctgaggtaccaggaacagtcaaagtcactgaaatgcttgaatatcctgattatgaacttgatgaaagataccaagaaggtatctttgtaaggcaaggtggcgtcatcagacttaccataccaatcaaaggaaaaccattcccaatatgtaaatggaccaaggaaggccaggatattagtaagcgtgccatgattgcaacatctgaaacacacactgagcttgtgatcaaagaagcagacaggggtgattctggcacttatgacctggttctggaaaataaatgtggcaagaaggctgtctacatcaaggtcagggtgataggaagtcccaacagtccagaagggccactggaatatgatgacatccaagtccgctctgtgagggtcagctggagacctcctgctgatgatggtggtgctgacatcttaggctacatcctcgagagacgagaagtgcctaaagccgcctggtataccattgattccagagtccgaggtacatctctggtggtaaaaggcctcaaagagaatgtagaataccatttccgtgtttcagcagaaaaccagtttggcataagcaaacccttgaaatctgaggaaccagtcacaccaaaaacaccattgaatcctccagaacctccaagcaatcctccagaagtactcgatgtaaccaagagttctgttagcttgtcctggtcccggcccaaagatgatggtggttctagagtcacaggctactacatcgaacgcaaagagacatccactgacaagtgggtcagacacaacaagactcagatcaccaccacaatgtacactgtcacagggcttgttcccgatgctgagtatcagttccgcatcatcgcacagaatgatgttggcctgagtgagaccagccctgcttctgaaccagttgtttgcaaagatccatttgataaaccaagccaaccaggagaacttgagattctttcaatatccaaagatagtgtcactctacagtgggagaaacctgaatgtgatggtggtaaagaaattcttggatactgggttgaatatagacagtctggagacagtgcctggaagaagagcaataaggaacgtattaaggacaagcaattcacaataggaggtttgctggaagctactgagtatgaattcagggtttttgctgagaatgagactgggctgagcagacctcgcagaactgctatgtctataaagactaaactcacatctggagaggccccaggaatacgcaaagaaatgaaggatgttaccacaaaattgggtgaagctgctcaactctcatgccagattgttggaaggcctcttcctgacattaaatggtacagatttggtaaagagctcatacaaagccggaaatacaaaatgtcttcagatggacgcacacacactcttacagtaatgacagaggaacaggaagatgaaggtgtttatacctgcatagccaccaatgaggttggagaagtagaaaccagtagtaagcttctcctgcaagcaacaccgcagttccatcctggttacccactgaaagagaaatattatggagctgtgggttccacacttcggcttcatgttatgtacattggtcgtccagtacctgccatgacttggttccatggtcagaaacttttgcaaaactcagaaaacattactattgaaaacactgagcactatactcatcttgtcatgaagaatgtccaacgtaagactcatgctgggaaatacaaagtccagctcagcaatgtttttggaacagttgatgccatccttgatgtggaaatacaagataaaccagacaaacctacaggaccaattgtgatcgaagctctattgaagaactccgcagtgatcagctggaaaccacccgcagatgacggaggctcctggatcaccaactatgtggtggaaaaatgtgaggccaaggagggggctgaatggcaattggtgtcttcagccatctcagtgacaacctgtagaattgtgaacctcacagaaaatgctggctattacttccgggtttcagctcagaacactttcggcatcagtgaccctctagaagtgtcctcagttgtgatcattaagagtccatttgaaaagccaggtgctcctggcaaaccaactattactgctgtcacaaaagattcttgtgttgtggcctggaagccacctgccagtgatggaggtgcaaagattagaaattactaccttgagaagcgtgagaagaagcagaataaatggatttctgtgacaacagaagaaattcgagaaactgtcttttcagtgaaaaaccttattgaaggtcttgaatacgagtttcgtgtgaaatgtgaaaatctaggtggggaaagtgaatggagtgaaatatcagaacccatcactcccaaatctgatgtcccaattcaggcaccacactttaaagaggaactgagaaatctaaatgtcagatatcagagcaatgctaccttggtctgcaaagtgactggtcatccaaaacctatcgtcaaatggtacagacaaggcaaagaaatcattgcagatggattaaaatataggattcaagaatttaagggtggctaccaccagctcatcattgcaagtgtcacagatgatgatgccacagtttaccaagtcagagctaccaaccaagggggatctgtgtctggcactgcctccttggaagtggaagttccagctaagatacacttacctaaaactcttgaaggcatgggagcagttcatgctctccgaggtgaagtggtcagcatcaagattcctttcagtggcaaaccagatcctgtgatcacctggcagaaaggacaagatctcattgacaataatggccactaccaagttattgtcacaagatccttcacatcacttgttttccccaatggggtagagagaaaagatgctggtttctatgtggtctgtgctaaaaacagatttggaattgatcagaagacagttgaactggatgtggctgatgttcctgacccacccagaggagtcaaagttagtgatgtctcacgagattctgtcaacttaacatggactgagccagcctctgatggtggcagcaaaatcaccaactacattgttgaaaaatgtgcaactactgcagaaagatggctccgtgtaggacaggcccgagaaacacgttataccgtgatcaacttatttggaaaaacaagttaccagttccgggtaatagctgaaaataaatttggtctgagcaagccttcagagccttcagaaccaaccataaccaaagaagataagaccagagctatgaactatgatgaagaggtagatgaaaccagggaagtctccatgactaaagcatctcactcttcaaccaaggaactctatgagaaatatatgattgctgaagatcttgggcgtggtgagtttggaattgtccatcgttgtgttgaaacatcctcaaagaagacatacatggccaaatttgttaaagtcaaagggactgatcaggttttggtaaagaaggaaatttccattctgaatattgctaggcatagaaacatcttacacctccatgaatcatttgaaagcatggaagaattagttatgatctttgagtttatatcaggacttgacatatttgagcgcattaacacaagtgcttttgaacttaatgaaagagaaattgtaagttatgttcaccaggtctgtgaagcacttcagtttttacacagtcataatattggacactttgacattagaccagaaaatatcatttaccaaaccagaagaagctctaccattaaaatcatagaatttggtcaagcccgtcagctgaaaccaggggacaacttcaggcttctattcactgccccagaatactatgcacctgaagtccaccagcatgatgttgtcagcacagccacagacatgtggtcacttggaacactggtatatgtgctattgagtggtatcaacccattcctggctgaaactaaccaacagatcattgagaatatcatgaatgctgaatatactttcgatgaggaagcattcaaagagattagcattgaagccatggattttgttgaccggttgttagtgaaagagaggaaatctcgcatgacagcatcggaggctctccagcacccatggttgaagcagaagatagaaagagtcagtactaaagttatcagaacattaaaacaccggcgttattaccacaccctgatcaagaaagacctcaacatggttgtgtcagcagcccggatctcctgtggtggtgcaattcgatctcagaagggagtgagtgttgctaaagttaaagtggcatccattgaaattggcccagtttctgggcagataatgcatgcagttggtgaagaaggaggacatgtcaaatatgtatgcaaaattgaaaattatgatcagtctacccaagtgacttggtactttggcgtccgacagctggagaacagtgagaaatacgaaatcacctacgaagatggagtggccatcctctatgtcaaagacattaccaaattagatgatggtacctacagatgcaaagtagtcaatgactatggtgaagacagttcttatgcagagctatttgttaaaggtgtgagagaagtctatgactattactgccgtagaaccatgaagaaaattaagcgcagaacagacacaatgagactcctggaaaggccaccagaatttaccctgcctctctataataagacagcttatgtaggtgaaaatgtccggtttg

SEQ ID NO: 1158 - DNA, 3859 bp, Homo sapiens
agccgccgccacccgccgcgcccgacacccgggaggccccgccagcccgcgggagaggcccagcgggagtcgcggaacagcaggcccgagcccaccgcgccgggccccggacgccgcgcggaaaagatgaatttacaaccaattttctggattggactgatcagttcagtttgctgtgtgtttgctcaaacagatgaaaatagatgtttaaaagcaaatgccaaatcatgtggagaatgtatacaagcagggccaaattgtgggtggtgcacaaattcaacatttttacaggaaggaatgcctacttctgcacgatgtgatgatttagaagccttaaaaaagaagggttgccctccagatgacatagaaaatcccagaggctccaaagatataaagaaaaataaaaatgtaaccaaccgtagcaaaggaacagcagagaagctcaagccagaggatattactcagatccaaccacagcagttggttttgcgattaagatcaggggagccacagacatttacattaaaattcaagagagctgaagactatcccattgacctctactaccttatggacctgtcttactcaatgaaagacgatttggagaatgtaaaaagtcttggaacagatctgatgaatgaaatgaggaggattacttcggacttcagaattggatttggctcatttgtggaaaagactgtgatgccttacattagcacaacaccagctaagctcaggaacccttgcacaagtgaacagaactgcaccagcccatttagctacaaaaatgtgctcagtcttactaataaaggagaagtatttaatgaacttgttggaaaacagcgcatatctggaaatttggattctccagaaggtggtttcgatgccatcatgcaagttgcagtttgtggatcactgattggctggaggaatgttacacggctgctggtgttttccacagatgccgggtttcactttgctggagatgggaaacttggtggcattgttttaccaaatgatggacaatgtcacctggaaaataatatgtacacaatgagccattattatgattatccttctattgctcaccttgtccagaaactgagtgaaaataatattcagacaatttttgcagttactgaagaatttcagcctgtttacaaggagctgaaaaacttgatccctaagtcagcagtaggaacattatctgcaaattctagcaatgtaattcagttgatcattgatgcatacaattccctttcctcagaagtcattttggaaaacggcaaattgtcagaaggagtaacaataagttacaaatcttactgcaagaacggggtgaatggaacaggggaaaatggaagaaaatgttccaatatttccattggagatgaggttcaatttgaaattagcataacttcaaataagtgtccaaaaaaggattctgacagctttaaaattaggcctctgggctttacggaggaagtagaggttattcttcagtacatctgtgaatgtgaatgccaaagcgaaggcatccctgaaagtcccaagtgtcatgaaggaaatgggacatttgagtgtggcgcgtgcaggtgcaatgaagggcgtgttggtagacattgtgaatgcagcacagatgaagttaacagtgaagacatggatgcttactgcaggaaagaaaacagttcagaaatctgcagtaacaatggagagtgcgtctgcggacagtgtgtttgtaggaagagggataatacaaatgaaatttattctggcaaattctgcgagtgtgataatttcaactgtgatagatccaatggcttaatttgtggaggaaatggtgtttgcaagtgtcgtgtgtgtgagtgcaaccccaactacactggcagtgcatgtgactgttctttggatactagtacttgtgaagccagcaacggacagatctgcaatggccggggcatctgcgagtgtggtgtctgtaagtgtacagatccgaagtttcaagggcaaacgtgtgagatgtgtcagacctgccttggtgtctgtgctgagcataaagaatgtgttcagtgcagagccttcaataaaggagaaaagaaagacacatgcacacaggaatgttcctattttaacattaccaaggtagaaagtcgggacaaattaccccagccggtccaacctgatcctgtgtcccattgtaaggagaaggatgttgacgactgttggttctattttacgtattcagtgaatgggaacaacgaggtcatggttcatgttgtggagaatccagagtgtcccactggtccagacatcattccaattgtagctggtgtggttgctggaattgttcttattggccttgcattactgctgatatggaagcttttaatgataattcatgacagaagggagtttgctaaatttgaaaaggagaaaatgaatgccaaatgggacacgcaagaaaatccgatttacaagagtcctattaataatttcaagaatccaaactacggacgtaaagctggtctctaaattgccggtgaaaatcctatttataagagtgccgtaacaactgtggtcaatccgaagtatgagggaaaatgagtactgcccgtgcaaatcccacaacactgaatgcaaagtagcaatttccatagtcacagttaggtagctttagggcaatattgccatggttttactcatgtgcaggttttgaaaatgtacaatatgtataatttttaaaatgttttattattttgaaaataatgttgtaattcatgccagggactgacaaaagacttgagacaggatggttattcttgtcagctaaggtcacattgtgcctttttgaccttttcttcctggactattgaaatcaagcttattggattaagtgatatttctatagcgattgaaagggcaatagttaaagtaatgagcatgatgagagtttctgttaatcatgtattaaaactgatttttagctttacaaatatgtcagtttgcagttatgcagaatccaaagtaaatgtcctgctagctagttaaggattgttttaaatctgttattttgctatttgcctgttagacatgactgatgacatatctgaaagacaagtatgttgagagttgctggtgtaaaatacgtttgaaatagttgatctacaaaggccatgggaaaaattcagagagttaggaaggaaaaaccaatagctttaaaacctgtgtgccattttaagagttacttaatgtttggtaacttttatgccttcactttacaaattcaagccttagataaaagaaccgagcaattttctgctaaaaagtccttgatttagcactatttacatacaggccatactttacaaagtatttgctgaatggggaccttttgagttgaatttattttattatttttattttgtttaatgtctggtgctttctatcacctcttctaatcttttaatgtatttgtttgcaattttggggtaagactttttttatgagtactttttctttgaagttttagcggtcaatttgcctttttaatgaacatgtgaagttatactgtggctatgcaacagctctcacctacgcgagtcttactttgagttagtgccataacagaccactgtatgtttacttctcaccatttgagttgcccatcttgtttcacactagtcacattcttgttttaagtgcctttagttttaacagttcactttttacagtgctatttactgaagttatttattaaatatgcctaaaatacttaaatcggatgtcttgactctgatgtattttatcaggttgtgtgcatgaaatttttatagattaaagaagttgaggaaaagcattt

SEQ ID NO: 1159 - DNA, 3614 bp, Homo sapiens
gtccgccaaaacctgcgcggatagggaagaacagcaccccggcgccgattgccgtaccaaacaagcctaacgtccgctgggccccggacgccgcgcggaaaagatgaatttacaaccaattttctggattggactgatcagttcagtttgctgtgtgtttgctcaaacagatgaaaatagatgtttaaaagcaaatgccaaatcatgtggagaatgtatacaagcagggccaaattgtgggtggtgcacaaattcaacatttttacaggaaggaatgcctacttctgcacgatgtgatgatttagaagccttaaaaaagaagggttgccctccagatgacatagaaaatcccagaggctccaaagatataaagaaaaataaaaatgtaaccaaccgtagcaaaggaacagcagagaagctcaagccagaggatattcatcagatccaaccacagcagttggttttgcgattaagatcaggggagccacagacatttacattaaaattcaagagagctgaagactatcccattgacctctactaccttatggacctgtcttattcaatgaaagacgatttggagaatgtaaaaagtcttggaacagatctgatgaatgaaatgaggaggattacttcggacttcagaattggatttggctcatttgtggaaaagactgtgatgccttacattagcacaacaccagctaagctcaggaacccttgcacaagtgaacagaactgcaccaccccatttagctacaaaaatgtgctcagtcttactaataaaggagaagtatttaatgaacttgttggaaaacagcgcatatctggaaatttggattctccagaaggtggtttcgatgccatcatgcaagttgcagtttgtggatcactgattggctggaggaatgttacacggctgctggtgttttccacagatgccgggtttcactttgctggagatgggaaacttggtggcattgttttaccaaatgatggacaatgtcacctggaaaataatatgtacacaatgagccattattatgattatccttctattgctcaccttgtccagaaactgagtgaaaataatattcagacaatttttgcagttactgaagaatttcagcctgtttacaaggagctgaaaaacttgatccctaagtcagcagtaggaacattatctgcaaattctagcaatgtaattcagttgatcattgatgcatacaattccctttcctcagaagtcattttggaaaacggcaaattgtcagaaggagtaacaataagttacaaatcttactgcaagaacggggtgaatggaacaggggaaaatggaagaaaatgttccaatatttccattggagatgaggttcaatttgaaattagcataacttcaaataagtgtccaaaaaaggattctgacagctttaaaattaggcctctgggctttacggaggaagtagaggttattcttcagtacatctgtgaatgtgaatgccaaagcgaaggcatccctgaaagtcccaagtgtcatgaaggaaatgggacatttgagtgtggcgcgtgcaggtgcaatgaagggcgtgttggtagacattgtgaatgcagcacagatgaagttaacagtgaagacatggatgcttactgcaggaaagaaaacagttcagaaatctgcagtaacaatggagagtgcgtctgcggacagtgtgtttgtaggaagagggataatacaaatgaaatttattctggcaaattctgcgagtgtgataatttcaactgtgatagatccaatggcttaatttgtggaggaaatggtgtttgcaagtgtcgtgtgtgtgagtgcaaccccaactacactggcagtgcatgtgactgttctttggatactagtacttgtgaagccagcaacggacagatctgcaatggccggggcatctgcgagtgtggtgtctgtaagtgtacagatccgaagtttcaagggcaaacgtgtgagatgtgtcagacctgccttggtgtctgtgctgagcataaagaatgtgttcagtgcagagccttcaataaaggagaaaagaaagacacatgcacacaggaatgttcctattttaacattaccaaggtagaaagtcgggacaaattaccccagccggtccaacctgatcctgtgtcccattgtaaggagaaggatgttgacgactgttggttctattttacgtattcagtgaatgggaacaacgaggtcatggttcatgttgtggagaatccagagtgtcccactggtccagacatcattccaattgtagctggtgtggttgctggaattgttcttattggccttgcattactgctgatatggaagcttttaatgataattcatgacagaagggagtttgctaaatttgaaaaggagaaaatgaatgccaaatgggacacgggtgaaaatcctatttataagagtgccgtaacaactgtggtcaatccgaagtatgagggaaaatgagtactgcccgtgcaaatcccacaacactgaatgcaaagtagcaatttccatagtcacagttaggtagctttagggcaatattgccatggttttactcatgtgcaggttttgaaaatgtacaatatgtataatttttaaaatgttttattattttgaaaataatgttgtaattcatgccagggactgacaaaagacttgagacaggatggttattcttgtcagctaaggtcacattgtgcctttttgaccttttcttcctggactattgaaatcaagcttattggattaagtgatatttctatagcgattgaaagggcaatagttaaagtaatgagcatgatgagagtttctgttaatcatgtattaaaactgatttttagctttacatatgtcagtttgcagttatgcagaatccaaagtaaatgtcctgctagctagttaaggattgttttaaatctgttattttgctatttgcctgttagacatgactgatgacatatctgaaagacaagtatgttgagagttgctggtgtaaaatacgtttgaaatagttgatctacaaaggccatgggaaaaattcagagagttaggaaggaaaaaccaatagctttaaaacctgtgtgccattttaagagttacttaatgtttggtaacttttatgccttcactttacaaattcaagccttagataaaagaaccgagcaattttctgctaaaaagtccttgatttagcactatttacatacaggccatactttacaaagtatttgctgaatggggaccttttgagttgaatttattttattatttttattttgtttaatgtctggtgctttctatcacctcttctaatcttttaatgtatttgtttgcaattttggggtaagacttttttatgagtactttttctttgaagttttagcggtcaatttgcctttttaatgaacatgtgaagttatactgtggctatgcaacagctctcacctacgcgagtcttactttgagttagtgccataacagaccactgtatgtttacttctcaccatttgagttgcccatcttgtttcacactagtcacattcttgttttaagtgcctttagttttaacagttca

SEQ ID NO: 1160 - DNA, 3778 bp, Homo sapiens
agccgccgccacccgccgcgcccgacacccgggaggccccgccagcccgcgggagaggcccagcgggagtcgcggaacagcaggcccgagcccaccgcgccgggccccggacgccgcgcggaaaagatgaatttacaaccaattttctggattggactgatcagttcagtttgctgtgtgtttgctcaaacagatgaaaatagatgtttaaaagcaaatgccaaatcatgtggagaatgtatacaagcagggccaaattgtgggtggtgcacaaattcaacatttttacaggaaggaatgcctacttctgcacgatgtgatgatttagaagccttaaaaaagaagggttgccctccagatgacatagaaaatcccagaggctccaaagatataaagaaaaataaaaatgtaaccaaccgtagcaaaggaacagcagagaagctcaagccagaggatattactcagatccaaccacagcagttggttttgcgattaagatcaggggagccacagacatttacattaaaattcaagagagctgaagactatcccattgacctctactaccttatggacctgtcttactcaatgaaagacgatttggagaatgtaaaaagtcttggaacagatctgatgaatgaaatgaggaggattacttcggacttcagaattggatttggctcatttgtggaaaagactgtgatgccttacattagcacaacaccagctaagctcaggaacccttgcacaagtgaacagaactgcaccagcccatttagctacaaaaatgtgctcagtcttactaataaaggagaagtatttaatgaacttgttggaaaacagcgcatatctggaaatttggattctccagaaggtggtttcgatgccatcatgcaagttgcagtttgtggatcactgattggctggaggaatgttacacggctgctggtgttttccacagatgccgggtttcactttgctggagatgggaaacttggtggcattgttttaccaaatgatggacaatgtcacctggaaaataatatgtacacaatgagccattattatgattatccttctattgctcaccttgtccagaaactgagtgaaaataatattcagacaatttttgcagttactgaagaatttcagcctgtttacaaggagctgaaaaacttgatccctaagtcagcagtaggaacattatctgcaaattctagcaatgtaattcagttgatcattgatgcatacaattccctttcctcagaagtcattttggaaaacggcaaattgtcagaaggagtaacaataagttacaaatcttactgcaagaacggggtgaatggaacaggggaaaatggaagaaaatgttccaatatttccattggagatgaggttcaatttgaaattagcataacttcaaataagtgtccaaaaaaggattctgacagctttaaaattaggcctctgggctttacggaggaagtagaggttattcttcagtacatctgtgaatgtgaatgccaaagcgaaggcatccctgaaagtcccaagtgtcatgaaggaaatgggacatttgagtgtggcgcgtgcaggtgcaatgaagggcgtgttggtagacattgtgaatgcagcacagatgaagttaacagtgaagacatggatgcttactgcaggaaagaaaacagttcagaaatctgcagtaacaatggagagtgcgtctgcggacagtgtgtttgtaggaagagggataatacaaatgaaatttattctggcaaattctgcgagtgtgataatttcaactgtgatagatccaatggcttaatttgtggaggaaatggtgtttgcaagtgtcgtgtgtgtgagtgcaaccccaactacactggcagtgcatgtgactgttctttggatactagtacttgtgaagccagcaacggacagatctgcaatggccggggcatctgcgagtgtggtgtctgtaagtgtacagatccgaagtttcaagggcaaacgtgtgagatgtgtcagacctgccttggtgtctgtgctgagcataaagaatgtgttcagtgcagagccttcaataaaggagaaaagaaagacacatgcacacaggaatgttcctattttaacattaccaaggtagaaagtcgggacaaattaccccagccggtccaacctgatcctgtgtcccattgtaaggagaaggatgttgacgactgttggttctattttacgtattcagtgaatgggaacaacgaggtcatggttcatgttgtggagaatccagagtgtcccactggtccagacatcattccaattgtagctggtgtggttgctggaattgttcttattggccttgcattactgctgatatggaagcttttaatgataattcatgacagaagggagtttgctaaatttgaaaaggagaaaatgaatgccaaatgggacacgggtgaaaatcctatttataagagtgccgtaacaactgtggtcaatccgaagtatgagggaaaatgagtactgcccgtgcaaatcccacaacactgaatgcaaagtagcaatttccatagtcacagttaggtagctttagggcaatattgccatggttttactcatgtgcaggttttgaaaatgtacaatatgtataatttttaaaatgttttattattttgaaaataatgttgtaattcatgccagggactgacaaaagacttgagacaggatggttattcttgtcagctaaggtcacattgtgcctttttgaccttttcttcctggactattgaaatcaagcttattggattaagtgatatttctatagcgattgaaagggcaatagttaaagtaatgagcatgatgagagtttctgttaatcatgtattaaaactgatttttagctttacaaatatgtcagtttgcagttatgcagaatccaaagtaaatgtcctgctagctagttaaggattgttttaaatctgttattttgctatttgcctgttagacatgactgatgacatatctgaaagacaagtatgttgagagttgctggtgtaaaatacgtttgaaatagttgatctacaaaggccatgggaaaaattcagagagttaggaaggaaaaaccaatagctttaaaacctgtgtgccattttaagagttacttaatgtttggtaacttttatgccttcactttacaaattcaagccttagataaaagaaccgagcaattttctgctaaaaagtccttgatttagcactatttacatacaggccatactttacaaagtatttgctgaatggggaccttttgagttgaatttattttattatttttattttgtttaatgtctggtgctttctatcacctcttctaatcttttaatgtatttgtttgcaattttggggtaagactttttttatgagtactttttctttgaagttttagcggtcaatttgcctttttaatgaacatgtgaagttatactgtggctatgcaacagctctcacctacgcgagtcttactttgagttagtgccataacagaccactgtatgtttacttctcaccatttgagttgcccatcttgtttcacactagtcacattcttgttttaagtgcctttagttttaacagttcactttttacagtgctatttactgaagttatttattaaatatgcctaaaatacttaaatcggatgtcttgactctgatgtattttatcaggttgtgtgcatgaaatttttatagattaaagaagttgaggaaaagcattt

SEQ ID NO: 1161 - DNA, 2533 bp, Homo sapiens
gagccagcccagccgcgttccgaacgcgagggtcgccggcctgggcgctgtcacgtcggggctgccggagctgcgggggaccgggcccgaacggcccctgacacctgcggtctcccgccgggctgggcaagcgcagatgaatttacaaccaattttctggattggactgatcagttcagtttgctgtgtgtttgctcaaacagatgaaaatagatgtttaaaagcaaatgccaaatcatgtggagaatgtatacaagcagggccaaattgtgggtggtgcacaaattcaacatttttacaggaaggaatgcctacttctgcacgatgtgatgatttagaagccttaaaaaagaagggttgccctccagatgacatagaaaatcccagaggctccaaagatataaagaaaaataaaaatgtaaccaaccgtagcaaaggaacagcagagaagctcaagccagaggatattactcagatccaaccacagcagttggttttgcgattaagatcaggggagccacagacatttacattaaaattcaagagagctgaagactatcccattgacctctactaccttatggacctgtcttactcaatgaaagacgatttggagaatgtaaaaagtcttggaacagatctgatgaatgaaatgaggaggattacttcggacttcagaattggatttggctcatttgtggaaaagactgtgatgccttacattagcacaacaccagctaagctcaggaacccttgcacaagtgaacagaactgcaccagcccatttagctacaaaaatgtgctcagtcttactaataaaggagaagtatttaatgaacttgttggaaaacagcgcatatctggaaatttggattctccagaaggtggtttcgatgccatcatgcaagttgcagtttgtggatcactgattggctggaggaatgttacacggctgctggtgttttccacagatgccgggtttcactttgctggagatgggaaacttggtggcattgttttaccaaatgatggacaatgtcacctggaaaataatatgtacacaatgagccattattatgattatccttctattgctcaccttgtccagaaactgagtgaaaataatattcagacaatttttgcagttactgaagaatttcagcctgtttacaaggagctgaaaaacttgatccctaagtcagcagtaggaacattatctgcaaattctagcaatgtaattcagttgatcattgatgcatacaattccctttcctcagaagtcattttggaaaacggcaaattgtcagaaggagtaacaataagttacaaatcttactgcaagaacggggtgaatggaacaggggaaaatggaagaaaatgttccaatatttccattggagatgaggttcaatttgaaattagcataacttcaaataagtgtccaaaaaaggattctgacagctttaaaattaggcctctgggctttacggaggaagtagaggttattcttcagtacatctgtgaatgtgaatgccaaagcgaaggcatccctgaaagtcccaagtgtcatgaaggaaatgggacatttgagtgtggcgcgtgcaggtgcaatgaagggcgtgttggtagacattgtgaatgcagcacagatgaagttaacagtgaagacatggatgcttactgcaggaaagaaaacagttcagaaatctgcagtaacaatggagagtgcgtctgcggacagtgtgtttgtaggaagagggataatacaaatgaaatttattctggcaaattctgcgagtgtgataatttcaactgtgatagatccaatggcttaatttgtggaggaaatggtgtttgcaagtgtcgtgtgtgtgagtgcaaccccaactacactggcagtgcatgtgactgttctttggatactagtacttgtgaagccagcaacggacagatctgcaatggccggggcatctgcgagtgtggtgtctgtaagtgtacagatccgaagtttcaagggcaaacgtgtgagatgtgtcagacctgccttggtgtctgtgctgagcataaagaatgtgttcagtgcagagccttcaataaaggagaaaagaaagacacatgcacacaggaatgttcctattttaacattaccaaggtagaaagtcgggacaaattaccccagccggtccaacctgatcctgtgtcccattgtaaggagaaggatgttgacgactgttggttctattttacgtattcagtgaatgggaacaacgaggtcatggttcatgttgtggagaatccagagtgtcccactggtccagacatcattccaattgtagctggtgtggttgctggaattgttcttattggccttgcattactgctgatatggaagcttttaatgataattcatgacagaagggagtttgctaaatttgaaaaggagaaaatgaatgccaaatgggacacgggtgaaaatcctatttataagagtgccgtaacaactgtggtcaatccgaagtatgagggaaaatga

SEQ ID NO: 1162 - DNA, 3405 bp, Homo sapiens
cagtttgatgtactaaaggcttctcgattgggagacaggaaacctgggtgtcagtgccgggtctgccactgaatttctgtgtgacctttgtcagagtactgtacttccagagcgttggtttccacatctaccctataaagcagcctgcatgtttctctcattctctcgttcgaggagttggaggatagctgctgcctgatatgaatttacaaccaattttctggattggactgatcagttcagtttgctgtgtgtttgctcaaacagatgaaaatagatgtttaaaagcaaatgccaaatcatgtggagaatgtatacaagcagggccaaattgtgggtggtgcacaaattcaacatttttacaggaaggaatgcctacttctgcacgatgtgatgatttagaagccttaaaaaagaagggttgccctccagatgacatagaaaatcccagaggctccaaagatataaagaaaaataaaaatgtaaccaaccgtagcaaaggaacagcagagaagctcaagccagaggatattactcagatccaaccacagcagttggttttgcgattaagatcaggggagccacagacatttacattaaaattcaagagagctgaagactatcccattgacctctactaccttatggacctgtcttactcaatgaaagacgatttggagaatgtaaaaagtcttggaacagatctgatgaatgaaatgaggaggattacttcggacttcagaattggatttggctcatttgtggaaaagactgtgatgccttacattagcacaacaccagctaagctcaggaacccttgcacaagtgaacagaactgcaccagcccatttagctacaaaaatgtgctcagtcttactaataaaggagaagtatttaatgaacttgttggaaaacagcgcatatctggaaatttggattctccagaaggtggtttcgatgccatcatgcaagttgcagtttgtggatcactgattggctggaggaatgttacacggctgctggtgttttccacagatgccgggtttcactttgctggagatgggaaacttggtggcattgttttaccaaatgatggacaatgtcacctggaaaataatatgtacacaatgagccattattatgattatccttctattgctcaccttgtccagaaactgagtgaaaataatattcagacaatttttgcagttactgaagaatttcagcctgtttacaaggagctgaaaaacttgatccctaagtcagcagtaggaacattatctgcaaattctagcaatgtaattcagttgatcattgatgcatacaattccctttcctcagaagtcattttggaaaacggcaaattgtcagaaggagtaacaataagttacaaatcttactgcaagaacggggtgaatggaacaggggaaaatggaagaaaatgttccaatatttccattggagatgaggttcaatttgaaattagcataacttcaaataagtgtccaaaaaaggattctgacagctttaaaattaggcctctgggctttacggaggaagtagaggttattcttcagtacatctgtgaatgtgaatgccaaagcgaaggcatccctgaaagtcccaagtgtcatgaaggaaatgggacatttgagtgtggcgcgtgcaggtgcaatgaagggcgtgttggtagacattgtgaatgcagcacagatgaagttaacagtgaagacatggatgcttactgcaggaaagaaaacagttcagaaatctgcagtaacaatggagagtgcgtctgcggacagtgtgtttgtaggaagagggataatacaaatgaaatttattctggcaaattctgcgagtgtgataatttcaactgtgatagatccaatggcttaatttgtggaggaaatggtgtttgcaagtgtcgtgtgtgtgagtgcaaccccaactacactggcagtgcatgtgactgttctttggatactagtacttgtgaagccagcaacggacagatctgcaatggccggggcatctgcgagtgtggtgtctgtaagtgtacagatccgaagtttcaagggcaaacgtgtgagatgtgtcagacctgccttggtgtctgtgctgagcataaagaatgtgttcagtgcagagccttcaataaaggagaaaagaaagacacatgcacacaggaatgttcctattttaacattaccaaggtagaaagtcgggacaaattaccccagccggtccaacctgatcctgtgtcccattgtaaggagaaggatgttgacgactgttggttctattttacgtattcagtgaatgggaacaacgaggtcatggttcatgttgtggagaatccagagtgtcccactggtccagacatcattccaattgtagctggtgtggttgctggaattgttcttattggccttgcattactgctgatatggaagcttttaatgataattcatgacagaagggagtttgctaaatttgaaaaggagaaaatgaatgccaaatgggacacgggtgaaaatcctatttataagagtgccgtaacaactgtggtcaatccgaagtatgagggaaaatgagtactgcccgtgcaaatcccacaacactgaatgcaaaacatgactgatgacatatctgaaagacaagtatgttgagagttgctggtgtaaaatacgtttgaaatagttgatctacaaaggccatgggaaaaattcagagagttaggaaggaaaaaccaatagctttaaaacctgtgtgccattttaagagttacttaatgtttggtaacttttatgccttcactttacaaattcaagccttagataaaagaaccgagcaattttctgctaaaaagtccttgatttagcactatttacatacaggccatactttacaaagtatttgctgaatggggaccttttgagttgaatttattttattatttttattttgtttaatgtctggtgctttctatcacctcttctaatcttttaatgtatttgtttgcaattttggggtaagactttttttatgagtactttttctttgaagttttagcggtcaatttgcctttttaatgaacatgtgaagttatactgtggctatgcaacagctctcacctacgcgagtcttactttgagttagtgccataacagaccactgtatgtttacttctcaccatttgagttgcccatcttgtttcacactagtcacattcttgttttaagtgcctttagttttaacagttcactttttacagtgctatttactgaagttatttattaaatatgcctaaaatacttaaatcggatgtcttgactctgatgtattttatcaggttgtgtgcatgaaatttttatagattaaagaagttgaggaaaagcattt

SEQ ID NO: 1163 - DNA, 3821 bp, Homo sapiens
agccgccgccacccgccgcgcccgacacccgggaggccccgccagcccgcgggagaggcccagcgggagtcgcggaacagcaggcccgagcccaccgcgccgggccccggacgccgcgcggaaaagatgaatttacaaccaattttctggattggactgatcagttcagtttgctgtgtgtttgctcaaacagatgaaaatagatgtttaaaagcaaatgccaaatcatgtggagaatgtatacaagcagggccaaattgtgggtggtgcacaaattcaacatttttacaggaaggaatgcctacttctgcacgatgtgatgatttagaagccttaaaaaagaagggttgccctccagatgacatagaaaatcccagaggctccaaagatataaagaaaaataaaaatgtaaccaaccgtagcaaaggaacagcagagaagctcaagccagaggatattactcagatccaaccacagcagttggttttgcgattaagatcaggggagccacagacatttacattaaaattcaagagagctgaagactatcccattgacctctactaccttatggacctgtcttactcaatgaaagacgatttggagaatgtaaaaagtcttggaacagatctgatgaatgaaatgaggaggattacttcggacttcagaattggatttggctcatttgtggaaaagactgtgatgccttacattagcacaacaccagctaagctcaggaacccttgcacaagtgaacagaactgcaccagcccatttagctacaaaaatgtgctcagtcttactaataaaggagaagtatttaatgaacttgttggaaaacagcgcatatctggaaatttggattctccagaaggtggtttcgatgccatcatgcaagttgcagtttgtggatcactgattggctggaggaatgttacacggctgctggtgttttccacagatgccgggtttcactttgctggagatgggaaacttggtggcattgttttaccaaatgatggacaatgtcacctggaaaataatatgtacacaatgagccattattatgattatccttctattgctcaccttgtccagaaactgagtgaaaataatattcagacaatttttgcagttactgaagaatttcagcctgtttacaaggagctgaaaaacttgatccctaagtcagcagtaggaacattatctgcaaattctagcaatgtaattcagttgatcattgatgcatacaattccctttcctcagaagtcattttggaaaacggcaaattgtcagaaggagtaacaataagttacaaatcttactgcaagaacggggtgaatggaacaggggaaaatggaagaaaatgttccaatatttccattggagatgaggttcaatttgaaattagcataacttcaaataagtgtccaaaaaaggattctgacagctttaaaattaggcctctgggctttacggaggaagtagaggttattcttcagtacatctgtgaatgtgaatgccaaagcgaaggcatccctgaaagtcccaagtgtcatgaaggaaatgggacatttgagtgtggcgcgtgcaggtgcaatgaagggcgtgttggtagacattgtgaatgcagcacagatgaagttaacagtgaagacatggatgcttactgcaggaaagaaaacagttcagaaatctgcagtaacaatggagagtgcgtctgcggacagtgtgtttgtaggaagagggataatacaaatgaaatttattctggcaaattctgcgagtgtgataatttcaactgtgatagatccaatggcttaatttgtggaggaaatggtgtttgcaagtgtcgtgtgtgtgagtgcaaccccaactacactggcagtgcatgtgactgttctttggatactagtacttgtgaagccagcaacggacagatctgcaatggccggggcatctgcgagtgtggtgtctgtaagtgtacagatccgaagtttcaagggcaaacgtgtgagatgtgtcagacctgccttggtgtctgtgctgagcataaagaatgtgttcagtgcagagccttcaataaaggagaaaagaaagacacatgcacacaggaatgttcctattttaacattaccaaggtagaaagtcgggacaaattaccccagccggtccaacctgatcctgtgtcccattgtaaggagaaggatgttgacgactgttggttctattttacgtattcagtgaatgggaacaacgaggtcatggttcatgttgtggagaatccagagtgtcccactggtccagacatcattccaattgtagctggtgtggttgctggaattgttcttattggccttgcattactgctgatatggaagcttttaatgataattcatgacagaagggagtttgctaaatttgaaaaggagaaaatgaatgccaaatgggacacgcctggagtgcagtggtgtgatatcagctcactgcaacctctgacttccagattccagcaattctcctgcctcagcctcccgagtacctgggattacagggtgaaaatcctatttataagagtgccgtaacaactgtggtcaatccgaagtatgagggaaaatgagtactgcccgtgcaaatcccacaacactgaatgcaaagtagcaatttccatagtcacagttaggtagctttagggcaatattgccatggttttactcatgtgcaggttttgaaaatgtacaatatgtataatttttaaaatgttttattattttgaaaataatgttgtaattcatgccagggactgacaaaagacttgagacaggatggttattcttgtcagctaaggtcacattgtgcctttttgaccttttcttcctggactattgaaatcaagcttattggattaagtgatatttctatagcgattgaaagggcaatagttaaagtaatgagcatgatgagagtttctgttaatcatgtattaaaactgatttttagctttacaaatatgtcagtttgcagttatgcagaatccaaagtaaatgtcctgctagctagttaaggattgttttaaatctgttattttgctatttgcctgttagacatgactgatgacatatctgaaagacaagtatgttgagagttgctggtgtaaaatacgtttgaaatagttgatctacaaaggccatgggaaaaattcagagagttaggaaggaaaaaccaatagctttaaaacctgtgtgccattttaagagttacttaatgtttggtaacttttatgccttcactttacaaattcaagccttagataaaagaaccgagcaattttctgttgctgaatggggaccttttgagttgaatttattttattatttttattttgtttaatgtctggtgctttctatcacctcttctaatcttttaatgtatttgtttgcaattttggggtaagactttttttatgagtactttttctttgaagttttagcggtcaatttgcctttttaatgaacatgtgaagttatactgtggctatgcaacagctctcacctacgcgagtcttactttgagttagtgccataacagaccactgtatgtttacttctcaccatttgagttgcccatcttgtttcacactagtcacattcttgttttaagtgcctttagttttaacagttcactttttacagtgctatttactgaagttatttattaaatatgcctaaaatacttaaatcggatgtcttgactctgatgtattttatcaggttgtgtgcatgaaatttttatagattaaagaagttgaggaaaagcattt

SEQ ID NO: 1164 - DNA, 3762 bp, Homo sapiens
atgaatttacaaccaattttctggattggactgatcagttcagtttgctgtgtgtttgctcaaacagatgaaaatagatgtttaaaagcaaatgccaaatcatgtggagaatgtatacaagcagggccaaattgtgggtggtgcacaaattcaacatttttacaggaaggaatgcctacttctgcacgatgtgatgatttagaagccttaaaaaagaagggttgccctccagatgacatagaaaatcccagaggctccaaagatataaagaaaaataaaaatgtaaccaaccgtagcaaaggaacagcagagaagctcaagccagaggatattactcagatccaaccacagcagttggttttgcgattaagatcaggggagccacagacatttacattaaaattcaagagagctgaagactatcccattgacctctactaccttatggacctgtcttactcaatgaaagacgatttggagaatgtaaaaagtcttggaacagatctgatgaatgaaatgaggaggattacttcggacttcagaattggatttggctcatttgtggaaaagactgtgatgccttacattagcacaacaccagctaagctcaggaacccttgcacaagtgaacagaactgcaccagcccatttagctacaaaaatgtgctcagtcttactaataaaggagaagtatttaatgaacttgttggaaaacagcgcatatctggaaatttggattctccagaaggtggtttcgatgccatcatgcaagttgcagtttgtggatcactgattggctggaggaatgttacacggctgctggtgttttccacagatgccgggtttcactttgctggagatgggaaacttggtggcattgttttaccaaatgatggacaatgtcacctggaaaataatatgtacacaatgagccattattatgattatccttctattgctcaccttgtccagaaactgagtgaaaataatattcagacaatttttgcagttactgaagaatttcagcctgtttacaaggagctgaaaaacttgatccctaagtcagcagtaggaacattatctgcaaattctagcaatgtaattcagttgatcattgatgcatacaattccctttcctcagaagtcattttggaaaacggcaaattgtcagaaggagtaacaataagttacaaatcttactgcaagaacggggtgaatggaacaggggaaaatggaagaaaatgttccaatatttccattggagatgaggttcaatttgaaattagcataacttcaaataagtgtccaaaaaaggattctgacagctttaaaattaggcctctgggctttacggaggaagtagaggttattcttcagtacatctgtgaatgtgaatgccaaagcgaaggcatccctgaaagtcccaagtgtcatgaaggaaatgggacatttgagtgtggcgcgtgcaggtgcaatgaagggcgtgttggtagacattgtgaatgcagcacagatgaagttaacagtgaagacatggatgcttactgcaggaaagaaaacagttcagaaatctgcagtaacaatggagagtgcgtctgcggacagtgtgtttgtaggaagagggataatacaaatgaaatttattctggcaaattctgcgagtgtgataatttcaactgtgatagatccaatggcttaatttgtggaggaaatggtgtttgcaagtgtcgtgtgtgtgagtgcaaccccaactacactggcagtgcatgtgactgttctttggatactagtacttgtgaagccagcaacggacagatctgcaatggccggggcatctgcgagtgtggtgtctgtaagtgtacagatccgaagtttcaagggcaaacgtgtgagatgtgtcagacctgccttggtgtctgtgctgagcataaagaatgtgttcagtgcagagccttcaataaaggagaaaagaaagacacatgcacacaggaatgttcctattttaacattaccaaggtagaaagtcgggacaaattaccccagccggtccaacctgatcctgtgtcccattgtaaggagaaggatgttgacgactgttggttctattttacgtattcagtgaatgggaacaacgaggtcatggttcatgttgtggagaatccagagtgtcccactggtccagacatcattccaattgtagctggtgtggttgctggaattgttcttattggccttgcattactgctgatatggaagcttttaatgataattcatgacagaagggagtttgctaaatttgaaaaggagaaaatgaatgccaaatgggacacggtaagttacaaaacatccaaaaagcaaagtggcttataaagtaaatgtaatactcctaagacttatgtattagctgtcaggctgattattaaagtcctttctaagtattttattcccccaaaagtttcttactcaaggaatttgcatttagtgaaaaacagaaagcatcctaaatatatcccattgaaacaaaacattgattataagcatgtatattctggttactgtggccagtatttttatttctttaatagttttgatcctaaatctgccttttcatctaatgtgaagtagaatcctaaataatgttatctgtgtagcaagctattcaatggaaagctgcttctttctttaaaacaaacaaacaaaaaaaaccttcagtgaaagccagattcaaaaggttatataccaagcttgtccaactcgcagctcgtcggccaggacatgcagcccagaatagctttgaatgtggccccaacacaaatttgtaaactttcttagaaattgtaattattattattatttttttttggtaacttttttttaaagctcatcagctatcgttagtgtattttatgtgtggcccaagacaattcttcttcttccagtgtggcccagggaagccaaaagattggacacccctgctatatactatatgattccatttagaggacattctggaaaagcaaaactgtaggggcaaaaatcagtggttgctaggggctggaatgggggaaagtgttgaccacagaggggcgtaagggatcttccttgggatgatcttgattgtgggtggatttatgtatttgaaaactcacagaactatgtactttaaaaagatgtatgttcctctatgaaaattatatctcagtaaactttggcttataaaaatcttaaaagccctaagtgaccgaaaggttatgttagcattgagtgctttgaaatatggagtcagagggtggggtaaccaaatgttggcctttgtgtattcatcttttgatacaagaaagcaatgccaatcttcagtatttttaaattgtaaatgaattttgtagttagttgcactttactacaatttgcttgggtttttaaaaattatcaattttttaaattacaaatttcagaagggtagaaataaaaaaaaagacatttatagtgttcaaacactataaagggattttttttttctgatgaaatcattagaaactatttcttttactttagcaagaaaatccgatttacaagagtcctattaataatttcaagaatccaaactacggacgtaaagctggtctctaaattgccgttcgtattttgtttcactttctgcctttgcatgtgaacttctatcttttttactgcactgtgtgtcctttatcactattgctgttctttttttaagtctggctttaaatatcgctattgtggctt

SEQ ID NO: 1165 - DNA, 3804 bp, Homo sapiens
agccgccgccacccgccgcgcccgacacccgggaggccccgccagcccgcgggagaggcccagcgggagtcgcggaacagcaggcccgagcccaccgcgccgggccccggacgccgcgcggaaaagatgaatttacaaccaattttctggattggactgatcagttcagtttgctgtgtgtttgctcaaacagatgaaaatagatgtttaaaagcaaatgccaaatcatgtggagaatgtatacaagcagggccaaattgtgggtggtgcacaaattcaacatttttacaggaaggaatgcctacttctgcacgatgtgatgatttagaagccttaaaaaagaagggttgccctccagatgacatagaaaatcccagaggctccaaagatataaagaaaaataaaaatgtaaccaaccgtagcaaaggaacagcagagaagctcaagccagaggatattactcagatccaaccacagcagttggttttgcgattaagatcaggggagccacagacatttacattaaaattcaagagagctgaagactatcccattgacctctactaccttatggacctgtcttactcaatgaaagacgatttggagaatgtaaaaagtcttggaacagatctgatgaatgaaatgaggaggattacttcggacttcagaattggatttggctcatttgtggaaaagactgtgatgccttacattagcacaacaccagctaagctcaggaacccttgcacaagtgaacagaactgcaccagcccatttagctacaaaaatgtgctcagtcttactaataaaggagaagtatttaatgaacttgttggaaaacagcgcatatctggaaatttggattctccagaaggtggtttcgatgccatcatgcaagttgcagtttgtggatcactgattggctggaggaatgttacacggctgctggtgttttccacagatgccgggtttcactttgctggagatgggaaacttggtggcattgttttaccaaatgatggacaatgtcacctggaaaataatatgtacacaatgagccattattatgattatccttctattgctcaccttgtccagaaactgagtgaaaataatattcagacaatttttgcagttactgaagaatttcagcctgtttacaaggagctgaaaaacttgatccctaagtcagcagtaggaacattatctgcaaattctagcaatgtaattcagttgatcattgatgcatacaattccctttcctcagaagtcattttggaaaacggcaaattgtcagaaggagtaacaataagttacaaatcttactgcaagaacggggtgaatggaacaggggaaaatggaagaaaatgttccaatatttccattggagatgaggttcaatttgaaattagcataacttcaaataagtgtccaaaaaaggattctgacagctttaaaattaggcctctgggctttacggaggaagtagaggttattcttcagtacatctgtgaatgtgaatgccaaagcgaaggcatccctgaaagtcccaagtgtcatgaaggaaatgggacatttgagtgtggcgcgtgcaggtgcaatgaagggcgtgttggtagacattgtgaatgcagcacagatgaagttaacagtgaagacatggatgcttactgcaggaaagaaaacagttcagaaatctgcagtaacaatggagagtgcgtctgcggacagtgtgtttgtaggaagagggataatacaaatgaaatttattctggcaaattctgcgagtgtgataatttcaactgtgatagatccaatggcttaatttgtggaggaaatggtgtttgcaagtgtcgtgtgtgtgagtgcaaccccaactacactggcagtgcatgtgactgttctttggatactagtacttgtgaagccagcaacggacagatctgcaatggccggggcatctgcgagtgtggtgtctgtaagtgtacagatccgaagtttcaagggcaaacgtgtgagatgtgtcagacctgccttggtgtctgtgctgagcataaagaatgtgttcagtgcagagccttcaataaaggagaaaagaaagacacatgcacacaggaatgttcctattttaacattaccaaggtagaaagtcgggacaaattaccccagccggtccaacctgatcctgtgtcccattgtaaggagaaggatgttgacgactgttggttctattttacgtattcagtgaatgggaacaacgaggtcatggttcatgttgtggagaatccagagtgtcccactggtccagacatcattccaattgtagctggtgtggttgctggaattgttcttattggccttgcattactgctgatatggaagcttttaatgataattcatgacagaagggagtttgctaaatttgaaaaggagaaaatgaatgccaaatgggacacgcaagaaaatccgatttacaagagtcctattaataatttcaagaatccaaactacggacgtaaagctggtctctaaattgccggtgaaaatcctatttataagagtgccgtaacaactgtggtcaatccgaagtatgagggaaaatgagtactgcccgtgcaaatcccacaacactgaatgcaaagtagcaatttccatagtcacagttaggtagctttagggcaatattgccatggttttactcatgtgcaggttttgaaaatgtacaatatgtataatttttaaaatgttttattattttgaaaataatgttgtaattcatgccagggactgacaaaagacttgagacaggatggttattcttgtcagctaaggtcacattgtgcctttttgaccttttcttcctggactattgaaatcaagcttattggattaagtgatatttctatagcgattgaaagggcaatagttaaagtaatgagcatgatgagagtttctgttaatcatgtattaaaactgatttttagctttacaaatatgtcagtttgcagttatgcagaatccaaagtaaatgtcctgctagctagttaaggattgttttaaatctgttattttgctatttgcctgttagacatgactgatgacatatctgaaagacaagtatgttgagagttgctggtgtaaaatacgtttgaaatagttgatctacaaaggccatgggaaaaattcagagagttaggaaggaaaaaccaatagctttaaaacctgtgtgccattttaagagttacttaatgtttggtaacttttatgccttcactttacaaattcaagccttagataaaagaaccgagcaattttctgttgctgaatggggaccttttgagttgaatttattttattatttttattttgtttaatgtctggtgctttctatcacctcttctaatcttttaatgtatttgtttgcaattttggggtaagactttttttatgagtactttttctttgaagttttagcggtcaatttgcctttttaatgaacatgtgaagttatactgtggctatgcaacagctctcacctacgcgagtcttactttgagttagtgccataacagaccactgtatgtttacttctcaccatttgagttgcccatcttgtttcacactagtcacattcttgttttaagtgcctttagttttaacagttcactttttacagtgctatttactgaagttatttattaaatatgcctaaaatacttaaatcggatgtcttgactctgatgtattttatcaggttgtgtgcatgaaatttttatagattaaagaagttgaggaaaagcattt

SEQ ID NO: 1166 - DNA, 3750 bp, Homo sapiens
atgaatttacaaccaattttctggattggactgatcagttcagtttgctgtgtgtttgctcaaacagatgaaaatagatgtttaaaagcaaatgccaaatcatgtggagaatgtatacaagcagggccaaattgtgggtggtgcacaaattcaacatttttacaggaaggaatgcctacttctgcacgatgtgatgatttagaagccttaaaaaagaagggttgccctccagatgacatagaaaatcccagaggctccaaagatataaagaaaaataaaaatgtaaccaaccgtagcaaaggaacagcagagaagctcaagccagaggatattactcagatccaaccacagcagttggttttgcgattaagatcaggggagccacagacatttacattaaaattcaagagagctgaagactatcccattgacctctactaccttatggacctgtcttactcaatgaaagacgatttggagaatgtaaaaagtcttggaacagatctgatgaatgaaatgaggaggattacttcggacttcagaattggatttggctcatttgtggaaaagactgtgatgccttacattagcacaacaccagctaagctcaggaacccttgcacaagtgaacagaactgcaccagcccatttagctacaaaaatgtgctcagtcttactaataaaggagaagtatttaatgaacttgttggaaaacagcgcatatctggaaatttggattctccagaaggtggtttcgatgccatcatgcaagttgcagtttgtggatcactgattggctggaggaatgttacacggctgctggtgttttccacagatgccgggtttcactttgctggagatgggaaacttggtggcattgttttaccaaatgatggacaatgtcacctggaaaataatatgtacacaatgagccattattatgattatccttctattgctcaccttgtccagaaactgagtgaaaataatattcagacaatttttgcagttactgaagaatttcagcctgtttacaaggagctgaaaaacttgatccctaagtcagcagtaggaacattatctgcaaattctagcaatgtaattcagttgatcattgatgcatacaattccctttcctcagaagtcattttggaaaacggcaaattgtcagaaggagtaacaataagttacaaatcttactgcaagaacggggtgaatggaacaggggaaaatggaagaaaatgttccaatatttccattggagatgaggttcaatttgaaattagcataacttcaaataagtgtccaaaaaaggattctgacagctttaaaattaggcctctgggctttacggaggaagtagaggttattcttcagtacatctgtgaatgtgaatgccaaagcgaaggcatccctgaaagtcccaagtgtcatgaaggaaatgggacatttgagtgtggcgcgtgcaggtgcaatgaagggcgtgttggtagacattgtgaatgcagcacagatgaagttaacagtgaagacatggatgcttactgcaggaaagaaaacagttcagaaatctgcagtaacaatggagagtgcgtctgcggacagtgtgtttgtaggaagagggataatacaaatgaaatttattctggcaaattctgcgagtgtgataatttcaactgtgatagatccaatggcttaatttgtggaggaaatggtgtttgcaagtgtcgtgtgtgtgagtgcaaccccaactacactggcagtgcatgtgactgttctttggatactagtacttgtgaagccagcaacggacagatctgcaatggccggggcatctgcgagtgtggtgtctgtaagtgtacagatccgaagtttcaagggcaaacgtgtgagatgtgtcagacctgccttggtgtctgtgctgagcataaagaatgtgttcagtgcagagccttcaataaaggagaaaagaaagacacatgcacacaggaatgttcctattttaacattaccaaggtagaaagtcgggacaaattaccccagccggtccaacctgatcctgtgtcccattgtaaggagaaggatgttgacgactgttggttctattttacgtattcagtgaatgggaacaacgaggtcatggttcatgttgtggagaatccagagtgtcccactggtccagacatcattccaattgtagctggtgtggttgctggaattgttcttattggccttgcattactgctgatatggaagcttttaatgataattcatgacagaagggagtttgctaaatttgaaaaggagaaaatgaatgccaaatgggacacgcctggagtgcagtggtgtgatatcagctcactgcaacctctgacttccagattccagcaattctcctgcctcagcctcccgagtacctgggattacagggtgaaaatcctatttataagagtgccgtaacaactgtggtcaatccgaagtatgagggaaaatgagtactgcccgtgcaaatcccacaacactgaatgcaaagtagcaatttccatagtcacagttaggtagctttagggcaatattgccatggttttactcatgtgcaggttttgaaaatgtacaatatgtataatttttaaaatgttttattattttgaaaataatgttgtaattcatgccagggactgacaaaagacttgagacaggatggttattcttgtcagctaaggtcacattgtgcctttttgaccttttcttcctggactattgaaatcaagcttattggattaagtgatatttctatagcgattgaaagggcaatagttaaagtaatgagcatgatgagagtttctgttaatcatgtattaaaactgatttttagctttacaaatatgtcagtttgcagttatgcagaatccaaagtaaatgtcctgctagctagttaaggattgttttaaatctgttattttgctatttgcctgttagacatgactgatgacatatctgaaagacaagtatgttgagagttgctggtgtaaaatacgtttgaaatagttgatctacaaaggccatgggaaaaattcagagagttaggaaggaaaaaccaatagctttaaaacctgtgtgccattttaagagttacttaatgtttggtaacttttatgccttcactttacaaattcaagccttagataaaagaaccgagcaattttctgctaaaaagtccttgatttagcactatttacatacaggccatactttacaaagtatttgctgaatggggaccttttgagttgaatttattttattatttttattttgtttaatgtctggtgctttctatcacctcttctaatcttttaatgtatttgtttgcaattttggggtaagactttttttatgagtactttttctttgaagttttagcggtcaatttgcctttttaatgaacatgtgaagttatactgtggctatgcaacagctctcacctacgcgagtcttactttgagttagtgccataacagaccactgtatgtttacttctcaccatttgagttgcccatcttgtttcacactagtcacattcttgttttaagtgcctttagttttaacagttcactttttacagtgctatttactgaagttatttattaaatatgcctaaaatacttaaatcggatgtcttgactctgatgtattttatcaggttgtgtgcatgaaatttttatagattaaagaagttgaggaaaagcattt

SEQ ID NO: 1167 - DNA, 3894 bp, Homo sapiens
agccgccgccacccgccgcgcccgacacccgggaggccccgccagcccgcgggagaggcccagcgggagtcgcggaacagcaggcccgagcccaccgcgccgggccccggacgccgcgcggaaaagatgaatttacaaccaattttctggattggactgatcagttcagtttgctgtgtgtttgctcaaacagatgaaaatagatgtttaaaagcaaatgccaaatcatgtggagaatgtatacaagcagggccaaattgtgggtggtgcacaaattcaacatttttacaggaaggaatgcctacttctgcacgatgtgatgatttagaagccttaaaaaagaagggttgccctccagatgacatagaaaatcccagaggctccaaagatataaagaaaaataaaaatgtaaccaaccgtagcaaaggaacagcagagaagctcaagccagaggatattactcagatccaaccacagcagttggttttgcgattaagatcaggggagccacagacatttacattaaaattcaagagagctgaagactatcccattgacctctactaccttatggacctgtcttactcaatgaaagacgatttggagaatgtaaaaagtcttggaacagatctgatgaatgaaatgaggaggattacttcggacttcagaattggatttggctcatttgtggaaaagactgtgatgccttacattagcacaacaccagctaagctcaggaacccttgcacaagtgaacagaactgcaccagcccatttagctacaaaaatgtgctcagtcttactaataaaggagaagtatttaatgaacttgttggaaaacagcgcatatctggaaatttggattctccagaaggtggtttcgatgccatcatgcaagttgcagtttgtggatcactgattggctggaggaatgttacacggctgctggtgttttccacagatgccgggtttcactttgctggagatgggaaacttggtggcattgttttaccaaatgatggacaatgtcacctggaaaataatatgtacacaatgagccattattatgattatccttctattgctcaccttgtccagaaactgagtgaaaataatattcagacaatttttgcagttactgaagaatttcagcctgtttacaaggagctgaaaaacttgatccctaagtcagcagtaggaacattatctgcaaattctagcaatgtaattcagttgatcattgatgcatacaattccctttcctcagaagtcattttggaaaacggcaaattgtcagaaggagtaacaataagttacaaatcttactgcaagaacggggtgaatggaacaggggaaaatggaagaaaatgttccaatatttccattggagatgaggttcaatttgaaattagcataacttcaaataagtgtccaaaaaaggattctgacagctttaaaattaggcctctgggctttacggaggaagtagaggttattcttcagtacatctgtgaatgtgaatgccaaagcgaaggcatccctgaaagtcccaagtgtcatgaaggaaatgggacatttgagtgtggcgcgtgcaggtgcaatgaagggcgtgttggtagacattgtgaatgcagcacagatgaagttaacagtgaagacatggatgcttactgcaggaaagaaaacagttcagaaatctgcagtaacaatggagagtgcgtctgcggacagtgtgtttgtaggaagagggataatacaaatgaaatttattctggcaaattctgcgagtgtgataatttcaactgtgatagatccaatggcttaatttgtggaggaaatggtgtttgcaagtgtcgtgtgtgtgagtgcaaccccaactacactggcagtgcatgtgactgttctttggatactagtacttgtgaagccagcaacggacagatctgcaatggccggggcatctgcgagtgtggtgtctgtaagtgtacagatccgaagtttcaagggcaaacgtgtgagatgtgtcagacctgccttggtgtctgtgctgagcataaagaatgtgttcagtgcagagccttcaataaaggagaaaagaaagacacatgcacacaggaatgttcctattttaacattaccaaggtagaaagtcgggacaaattaccccagccggtccaacctgatcctgtgtcccattgtaaggagaaggatgttgacgactgttggttctattttacgtattcagtgaatgggaacaacgaggtcatggttcatgttgtggagaatccagagtgtcccactggtccagacatcattccaattgtagctggtgtggttgctggaattgttcttattggccttgcattactgctgatatggaagcttttaatgataattcatgacagaagggagtttgctaaatttgaaaaggagaaaatgaatgccaaatgggacacgtctctctctgtcgcccagcctggagtgcagtggtgtgatatcagctcactgcaacctctgacttccagattccagcaattctcctgcctcagcctcccgagtacctgggattacagggtgaaaatcctatttataagagtgccgtaacaactgtggtcaatccgaagtatgagggaaaatgagtactgcccgtgcaaatcccacaacactgaatgcaaagtagcaatttccatagtcacagttaggtagctttagggcaatattgccatggttttactcatgtgcaggttttgaaaatgtacaatatgtataatttttaaaatgttttattattttgaaaataatgttgtaattcatgccagggactgacaaaagacttgagacaggatggttattcttgtcagctaaggtcacattgtgcctttttgaccttttcttcctggactattgaaatcaagcttattggattaagtgatatttctatagcgattgaaagggcaatagttaaagtaatgagcatgatgagagtttctgttaatcatgtattaaaactgatttttagctttacaaatatgtcagtttgcagttatgcagaatccaaagtaaatgtcctgctagctagttaaggattgttttaaatctgttattttgctatttgcctgttagacatgactgatgacatatctgaaagacaagtatgttgagagttgctggtgtaaaatacgtttgaaatagttgatctacaaaggccatgggaaaaattcagagagttaggaaggaaaaaccaatagctttaaaacctgtgtgccattttaagagttacttaatgtttggtaacttttatgccttcactttacaaattcaagccttagataaaagaaccgagcaattttctgctaaaaagtccttgatttagcactatttacatacaggccatactttacaaagtatttgctgaatggggaccttttgagttgaatttattttattatttttattttgtttaatgtctggtgctttctatcacctcttctaatcttttaatgtatttgtttgcaattttggggtaagactttttttatgagtactttttctttgaagttttagcggtcaatttgcctttttaatgaacatgtgaagttatactgtggctatgcaacagctctcacctacgcgagtcttactttgagttagtgccataacagaccactgtatgtttacttctcaccatttgagttgcccatcttgtttcacactagtcacattcttgttttaagtgcctttagttttaacagttcactttttacagtgctatttactgaagttatttattaaatatgcctaaaatacttaaatcggatgtcttgactctgatgtattttatcaggttgtgtgcatgaaatttttatagattaaagaagttgaggaaaagcattt

SEQ ID NO: 1168 - DNA, 3888 bp, Homo sapiens
agccgccgccacccgccgcgcccgacacccgggaggccccgccagcccgcgggagaggcccagcgggagtcgcggaacagcaggcccgagcccaccgcgccgggccccggacgccgcgcggaaaagatgaatttacaaccaattttctggattggactgatcagttcagtttgctgtgtgtttgctcaaacagatgaaaatagatgtttaaaagcaaatgccaaatcatgtggagaatgtatacaagcagggccaaattgtgggtggtgcacaaattcaacatttttacaggaaggaatgcctacttctgcacgatgtgatgatttagaagccttaaaaaagaagggttgccctccagatgacatagaaaatcccagaggctccaaagatataaagaaaaataaaaatgtaaccaaccgtagcaaaggaacagcagagaagctcaagccagaggatattactcagatccaaccacagcagttggttttgcgattaagatcaggggagccacagacatttacattaaaattcaagagagctgaagactatcccattgacctctactaccttatggacctgtcttactcaatgaaagacgatttggagaatgtaaaaagtcttggaacagatctgatgaatgaaatgaggaggattacttcggacttcagaattggatttggctcatttgtggaaaagactgtgatgccttacattagcacaacaccagctaagctcaggaacccttgcacaagtgaacagaactgcaccagcccatttagctacaaaaatgtgctcagtcttactaataaaggagaagtatttaatgaacttgttggaaaacagcgcatatctggaaatttggattctccagaaggtggtttcgatgccatcatgcaagttgcagtttgtggatcactgattggctggaggaatgttacacggctgctggtgttttccacagatgccgggtttcactttgctggagatgggaaacttggtggcattgttttaccaaatgatggacaatgtcacctggaaaataatatgtacacaatgagccattattatgattatccttctattgctcaccttgtccagaaactgagtgaaaataatattcagacaatttttgcagttactgaagaatttcagcctgtttacaaggagctgaaaaacttgatccctaagtcagcagtaggaacattatctgcaaattctagcaatgtaattcagttgatcattgatgcatacaattccctttcctcagaagtcattttggaaaacggcaaattgtcagaaggagtaacaataagttacaaatcttactgcaagaacggggtgaatggaacaggggaaaatggaagaaaatgttccaatatttccattggagatgaggttcaatttgaaattagcataacttcaaataagtgtccaaaaaaggattctgacagctttaaaattaggcctctgggctttacggaggaagtagaggttattcttcagtacatctgtgaatgtgaatgccaaagcgaaggcatccctgaaagtcccaagtgtcatgaaggaaatgggacatttgagtgtggcgcgtgcaggtgcaatgaagggcgtgttggtagacattgtgaatgcagcacagatgaagttaacagtgaagacatggatgcttactgcaggaaagaaaacagttcagaaatctgcagtaacaatggagagtgcgtctgcggacagtgtgtttgtaggaagagggataatacaaatgaaatttattctggcaaattctgcgagtgtgataatttcaactgtgatagatccaatggcttaatttgtggaggaaatggtgtttgcaagtgtcgtgtgtgtgagtgcaaccccaactacactggcagtgcatgtgactgttctttggatactagtacttgtgaagccagcaacggacagatctgcaatggccggggcatctgcgagtgtggtgtctgtaagtgtacagatccgaagtttcaagggcaaacgtgtgagatgtgtcagacctgccttggtgtctgtgctgagcataaagaatgtgttcagtgcagagccttcaataaaggagaaaagaaagacacatgcacacaggaatgttcctattttaacattaccaaggtagaaagtcgggacaaattaccccagccggtccaacctgatcctgtgtcccattgtaaggagaaggatgttgacgactgttggttctattttacgtattcagtgaatgggaacaacgaggtcatggttcatgttgtggagaatccagagtgtcccactggtccagacatcattccaattgtagctggtgtggttgctggaattgttcttattggccttgcattactgctgatatggaagcttttaatgataattcatgacagaagggagtttgctaaatttgaaaaggagaaaatgaatgccaaatgggacacggtaagttacaaaacatccaaaaagcaaagtggcttataaagtaaatgtaatactcctaagacttatgtattagctgtcaggctgattattaaagtcctttctaagtattttattcccccaaaagtttcttactcaaggaatttgcatttagtgaaaaacagaaagcatcctaaatatatcccattgaaacaaaacattgattataagcatgtatattctggttactgtggccagtatttttatttctttaatagttttgatcctaaatctgccttttcatctaatgtgaagtagaatcctaaataatgttatctgtgtagcaagctattcaatggaaagctgcttctttctttaaaacaaacaaacaaaaaaaaccttcagtgaaagccagattcaaaaggttatataccaagcttgtccaactcgcagctcgtcggccaggacatgcagcccagaatagctttgaatgtggccccaacacaaatttgtaaactttcttagaaattgtaattattattattatttttttttggtaacttttttttaaagctcatcagctatcgttagtgtattttatgtgtggcccaagacaattcttcttcttccagtgtggcccagggaagccaaaagattggacacccctgctatatactatatgattccatttagaggacattctggaaaagcaaaactgtaggggcaaaaatcagtggttgctaggggctggaatgggggaaagtgttgaccacagaggggcgtaagggatcttccttgggatgatcttgattgtgggtggatttatgtatttgaaaactcacagaactatgtactttaaaaagatgtatgttcctctatgaaaattatatctcagtaaactttggcttataaaaatcttaaaagccctaagtgaccgaaaggttatgttagcattgagtgctttgaaatatggagtcagagggtggggtaaccaaatgttggcctttgtgtattcatcttttgatacaagaaagcaatgccaatcttcagtatttttaaattgtaaatgaattttgtagttagttgcactttactacaatttgcttgggtttttaaaaattatcaattttttaaattacaaatttcagaagggtagaaataaaaaaaaagacatttatagtgttcaaacactataaagggattttttttttctgatgaaatcattagaaactatttcttttactttagcaagaaaatccgatttacaagagtcctattaataatttcaagaatccaaactacggacgtaaagctggtctctaaattgccgttcgtattttgtttcactttctgcctttgcatgtgaacttctatcttttttactgcactgtgtgtcctttatcactattgctgttctttttttaagtctggctttaaatatcgctattgtggctt

SEQ ID NO: 1169 - DNA, 2481 bp, Homo sapiens
atgaatttacaaccaattttctggattggactgatcagttcagtttgctgtgtgtttgctcaaacagatgaaaatagatgtttaaaagcaaatgccaaatcatgtggagaatgtatacaagcagggccaaattgtgggtggtgcacaaattcaacatttttacaggaaggaatgcctacttctgcacgatgtgatgatttagaagccttaaaaaagaagggttgccctccagatgacatagaaaatcccagaggctccaaagatataaagaaaaataaaaatgtaaccaaccgtagcaaaggaacagcagagaagctcaagccagaggatattactcagatccaaccacagcagttggttttgcgattaagatcaggggagccacagacatttacattaaaattcaagagagctgaagactatcccattgacctctactaccttatggacctgtcttactcaatgaaagacgatttggagaatgtaaaaagtcttggaacagatctgatgaatgaaatgaggaggattacttcggacttcagaattggatttggctcatttgtggaaaagactgtgatgccttacattagcacaacaccagctaagctcaggaacccttgcacaagtgaacagaactgcaccagcccatttagctacaaaaatgtgctcagtcttactaataaaggagaagtatttaatgaacttgttggaaaacagcgcatatctggaaatttggattctccagaaggtggtttcgatgccatcatgcaagttgcagtttgtggatcactgattggctggaggaatgttacacggctgctggtgttttccacagatgccgggtttcactttgctggagatgggaaacttggtggcattgttttaccaaatgatggacaatgtcacctggaaaataatatgtacacaatgagccattattatgattatccttctattgctcaccttgtccagaaactgagtgaaaataatattcagacaatttttgcagttactgaagaatttcagcctgtttacaaggagctgaaaaacttgatccctaagtcagcagtaggaacattatctgcaaattctagcaatgtaattcagttgatcattgatgcatacaattccctttcctcagaagtcattttggaaaacggcaaattgtcagaaggagtaacaataagttacaaatcttactgcaagaacggggtgaatggaacaggggaaaatggaagaaaatgttccaatatttccattggagatgaggttcaatttgaaattagcataacttcaaataagtgtccaaaaaaggattctgacagctttaaaattaggcctctgggctttacggaggaagtagaggttattcttcagtacatctgtgaatgtgaatgccaaagcgaaggcatccctgaaagtcccaagtgtcatgaaggaaatgggacatttgagtgtggcgcgtgcaggtgcaatgaagggcgtgttggtagacattgtgaatgcagcacagatgaagttaacagtgaagacatggatgcttactgcaggaaagaaaacagttcagaaatctgcagtaacaatggagagtgcgtctgcggacagtgtgtttgtaggaagagggataatacaaatgaaatttattctggcaaattctgcgagtgtgataatttcaactgtgatagatccaatggcttaatttgtggaggaaatggtgtttgcaagtgtcgtgtgtgtgagtgcaaccccaactacactggcagtgcatgtgactgttctttggatactagtacttgtgaagccagcaacggacagatctgcaatggccggggcatctgcgagtgtggtgtctgtaagtgtacagatccgaagtttcaagggcaaacgtgtgagatgtgtcagacctgccttggtgtctgtgctgagcataaagaatgtgttcagtgcagagccttcaataaaggagaaaagaaagacacatgcacacaggaatgttcctattttaacattaccaaggtagaaagtcgggacaaattaccccagccggtccaacctgatcctgtgtcccattgtaaggagaaggatgttgacgactgttggttctattttacgtattcagtgaatgggaacaacgaggtcatggttcatgttgtggagaatccagagtgtcccactggtccagacatcattccaattgtagctggtgtggttgctggaattgttcttattggccttgcattactgctgatatggaagcttttaatgataattcatgacagaagggagtttgctaaatttgaaaaggagaaaatgaatgccaaatgggacacgcaagaaaatccgatttacaagagtcctattaataatttcaagaatccaaactacggacgtaaagctggtctctaaattgccggtgaaaatcctatttataagagtgccgtaacaactgtggtcaatccgaagtatgagggaaaatgagta

SEQ ID NO: 1170 - DNA, 2498 bp, Homo sapiens
atgaatttacaaccaattttctggattggactgatcagttcagtttgctgtgtgtttgctcaaacagatgaaaatagatgtttaaaagcaaatgccaaatcatgtggagaatgtatacaagcagggccaaattgtgggtggtgcacaaattcaacatttttacaggaaggaatgcctacttctgcacgatgtgatgatttagaagccttaaaaaagaagggttgccctccagatgacatagaaaatcccagaggctccaaagatataaagaaaaataaaaatgtaaccaaccgtagcaaaggaacagcagagaagctcaagccagaggatattactcagatccaaccacagcagttggttttgcgattaagatcaggggagccacagacatttacattaaaattcaagagagctgaagactatcccattgacctctactaccttatggacctgtcttactcaatgaaagacgatttggagaatgtaaaaagtcttggaacagatctgatgaatgaaatgaggaggattacttcggacttcagaattggatttggctcatttgtggaaaagactgtgatgccttacattagcacaacaccagctaagctcaggaacccttgcacaagtgaacagaactgcaccagcccatttagctacaaaaatgtgctcagtcttactaataaaggagaagtatttaatgaacttgttggaaaacagcgcatatctggaaatttggattctccagaaggtggtttcgatgccatcatgcaagttgcagtttgtggatcactgattggctggaggaatgttacacggctgctggtgttttccacagatgccgggtttcactttgctggagatgggaaacttggtggcattgttttaccaaatgatggacaatgtcacctggaaaataatatgtacacaatgagccattattatgattatccttctattgctcaccttgtccagaaactgagtgaaaataatattcagacaatttttgcagttactgaagaatttcagcctgtttacaaggagctgaaaaacttgatccctaagtcagcagtaggaacattatctgcaaattctagcaatgtaattcagttgatcattgatgcatacaattccctttcctcagaagtcattttggaaaacggcaaattgtcagaaggagtaacaataagttacaaatcttactgcaagaacggggtgaatggaacaggggaaaatggaagaaaatgttccaatatttccattggagatgaggttcaatttgaaattagcataacttcaaataagtgtccaaaaaaggattctgacagctttaaaattaggcctctgggctttacggaggaagtagaggttattcttcagtacatctgtgaatgtgaatgccaaagcgaaggcatccctgaaagtcccaagtgtcatgaaggaaatgggacatttgagtgtggcgcgtgcaggtgcaatgaagggcgtgttggtagacattgtgaatgcagcacagatgaagttaacagtgaagacatggatgcttactgcaggaaagaaaacagttcagaaatctgcagtaacaatggagagtgcgtctgcggacagtgtgtttgtaggaagagggataatacaaatgaaatttattctggcaaattctgcgagtgtgataatttcaactgtgatagatccaatggcttaatttgtggaggaaatggtgtttgcaagtgtcgtgtgtgtgagtgcaaccccaactacactggcagtgcatgtgactgttctttggatactagtacttgtgaagccagcaacggacagatctgcaatggccggggcatctgcgagtgtggtgtctgtaagtgtacagatccgaagtttcaagggcaaacgtgtgagatgtgtcagacctgccttggtgtctgtgctgagcataaagaatgtgttcagtgcagagccttcaataaaggagaaaagaaagacacatgcacacaggaatgttcctattttaacattaccaaggtagaaagtcgggacaaattaccccagccggtccaacctgatcctgtgtcccattgtaaggagaaggatgttgacgactgttggttctattttacgtattcagtgaatgggaacaacgaggtcatggttcatgttgtggagaatccagagtgtcccactggtccagacatcattccaattgtagctggtgtggttgctggaattgttcttattggccttgcattactgctgatatggaagcttttaatgataattcatgacagaagggagtttgctaaatttgaaaaggagaaaatgaatgccaaatgggacacgcctggagtgcagtggtgtgatatcagctcactgcaacctctgacttccagattccagcaattctcctgcctcagcctcccgagtacctgggattacagggtgaaaatcctatttataagagtgccgtaacaactgtggtcaatccgaagtatgagggaaaatgagta

SEQ ID NO: 1171 - DNA, 3733 bp, Homo sapiens
atgaatttacaaccaattttctggattggactgatcagttcagtttgctgtgtgtttgctcaaacagatgaaaatagatgtttaaaagcaaatgccaaatcatgtggagaatgtatacaagcagggccaaattgtgggtggtgcacaaattcaacatttttacaggaaggaatgcctacttctgcacgatgtgatgatttagaagccttaaaaaagaagggttgccctccagatgacatagaaaatcccagaggctccaaagatataaagaaaaataaaaatgtaaccaaccgtagcaaaggaacagcagagaagctcaagccagaggatattactcagatccaaccacagcagttggttttgcgattaagatcaggggagccacagacatttacattaaaattcaagagagctgaagactatcccattgacctctactaccttatggacctgtcttactcaatgaaagacgatttggagaatgtaaaaagtcttggaacagatctgatgaatgaaatgaggaggattacttcggacttcagaattggatttggctcatttgtggaaaagactgtgatgccttacattagcacaacaccagctaagctcaggaacccttgcacaagtgaacagaactgcaccagcccatttagctacaaaaatgtgctcagtcttactaataaaggagaagtatttaatgaacttgttggaaaacagcgcatatctggaaatttggattctccagaaggtggtttcgatgccatcatgcaagttgcagtttgtggatcactgattggctggaggaatgttacacggctgctggtgttttccacagatgccgggtttcactttgctggagatgggaaacttggtggcattgttttaccaaatgatggacaatgtcacctggaaaataatatgtacacaatgagccattattatgattatccttctattgctcaccttgtccagaaactgagtgaaaataatattcagacaatttttgcagttactgaagaatttcagcctgtttacaaggagctgaaaaacttgatccctaagtcagcagtaggaacattatctgcaaattctagcaatgtaattcagttgatcattgatgcatacaattccctttcctcagaagtcattttggaaaacggcaaattgtcagaaggagtaacaataagttacaaatcttactgcaagaacggggtgaatggaacaggggaaaatggaagaaaatgttccaatatttccattggagatgaggttcaatttgaaattagcataacttcaaataagtgtccaaaaaaggattctgacagctttaaaattaggcctctgggctttacggaggaagtagaggttattcttcagtacatctgtgaatgtgaatgccaaagcgaaggcatccctgaaagtcccaagtgtcatgaaggaaatgggacatttgagtgtggcgcgtgcaggtgcaatgaagggcgtgttggtagacattgtgaatgcagcacagatgaagttaacagtgaagacatggatgcttactgcaggaaagaaaacagttcagaaatctgcagtaacaatggagagtgcgtctgcggacagtgtgtttgtaggaagagggataatacaaatgaaatttattctggcaaattctgcgagtgtgataatttcaactgtgatagatccaatggcttaatttgtggaggaaatggtgtttgcaagtgtcgtgtgtgtgagtgcaaccccaactacactggcagtgcatgtgactgttctttggatactagtacttgtgaagccagcaacggacagatctgcaatggccggggcatctgcgagtgtggtgtctgtaagtgtacagatccgaagtttcaagggcaaacgtgtgagatgtgtcagacctgccttggtgtctgtgctgagcataaagaatgtgttcagtgcagagccttcaataaaggagaaaagaaagacacatgcacacaggaatgttcctattttaacattaccaaggtagaaagtcgggacaaattaccccagccggtccaacctgatcctgtgtcccattgtaaggagaaggatgttgacgactgttggttctattttacgtattcagtgaatgggaacaacgaggtcatggttcatgttgtggagaatccagagtgtcccactggtccagacatcattccaattgtagctggtgtggttgctggaattgttcttattggccttgcattactgctgatatggaagcttttaatgataattcatgacagaagggagtttgctaaatttgaaaaggagaaaatgaatgccaaatgggacacgcaagaaaatccgatttacaagagtcctattaataatttcaagaatccaaactacggacgtaaagctggtctctaaattgccggtgaaaatcctatttataagagtgccgtaacaactgtggtcaatccgaagtatgagggaaaatgagtactgcccgtgcaaatcccacaacactgaatgcaaagtagcaatttccatagtcacagttaggtagctttagggcaatattgccatggttttactcatgtgcaggttttgaaaatgtacaatatgtataatttttaaaatgttttattattttgaaaataatgttgtaattcatgccagggactgacaaaagacttgagacaggatggttattcttgtcagctaaggtcacattgtgcctttttgaccttttcttcctggactattgaaatcaagcttattggattaagtgatatttctatagcgattgaaagggcaatagttaaagtaatgagcatgatgagagtttctgttaatcatgtattaaaactgatttttagctttacaaatatgtcagtttgcagttatgcagaatccaaagtaaatgtcctgctagctagttaaggattgttttaaatctgttattttgctatttgcctgttagacatgactgatgacatatctgaaagacaagtatgttgagagttgctggtgtaaaatacgtttgaaatagttgatctacaaaggccatgggaaaaattcagagagttaggaaggaaaaaccaatagctttaaaacctgtgtgccattttaagagttacttaatgtttggtaacttttatgccttcactttacaaattcaagccttagataaaagaaccgagcaattttctgctaaaaagtccttgatttagcactatttacatacaggccatactttacaaagtatttgctgaatggggaccttttgagttgaatttattttattatttttattttgtttaatgtctggtgctttctatcacctcttctaatcttttaatgtatttgtttgcaattttggggtaagactttttttatgagtactttttctttgaagttttagcggtcaatttgcctttttaatgaacatgtgaagttatactgtggctatgcaacagctctcacctacgcgagtcttactttgagttagtgccataacagaccactgtatgtttacttctcaccatttgagttgcccatcttgtttcacactagtcacattcttgttttaagtgcctttagttttaacagttcactttttacagtgctatttactgaagttatttattaaatatgcctaaaatacttaaatcggatgtcttgactctgatgtattttatcaggttgtgtgcatgaaatttttatagattaaagaagttgaggaaaagcattt

SEQ ID NO: 1172 - DNA, 3876 bp, Homo sapiens
agccgccgccacccgccgcgcccgacacccgggaggccccgccagcccgcgggagaggcccagcgggagtcgcggaacagcaggcccgagcccaccgcgccgggccccggacgccgcgcggaaaagatgaatttacaaccaattttctggattggactgatcagttcagtttgctgtgtgtttgctcaaacagatgaaaatagatgtttaaaagcaaatgccaaatcatgtggagaatgtatacaagcagggccaaattgtgggtggtgcacaaattcaacatttttacaggaaggaatgcctacttctgcacgatgtgatgatttagaagccttaaaaaagaagggttgccctccagatgacatagaaaatcccagaggctccaaagatataaagaaaaataaaaatgtaaccaaccgtagcaaaggaacagcagagaagctcaagccagaggatattactcagatccaaccacagcagttggttttgcgattaagatcaggggagccacagacatttacattaaaattcaagagagctgaagactatcccattgacctctactaccttatggacctgtcttactcaatgaaagacgatttggagaatgtaaaaagtcttggaacagatctgatgaatgaaatgaggaggattacttcggacttcagaattggatttggctcatttgtggaaaagactgtgatgccttacattagcacaacaccagctaagctcaggaacccttgcacaagtgaacagaactgcaccagcccatttagctacaaaaatgtgctcagtcttactaataaaggagaagtatttaatgaacttgttggaaaacagcgcatatctggaaatttggattctccagaaggtggtttcgatgccatcatgcaagttgcagtttgtggatcactgattggctggaggaatgttacacggctgctggtgttttccacagatgccgggtttcactttgctggagatgggaaacttggtggcattgttttaccaaatgatggacaatgtcacctggaaaataatatgtacacaatgagccattattatgattatccttctattgctcaccttgtccagaaactgagtgaaaataatattcagacaatttttgcagttactgaagaatttcagcctgtttacaaggagctgaaaaacttgatccctaagtcagcagtaggaacattatctgcaaattctagcaatgtaattcagttgatcattgatgcatacaattccctttcctcagaagtcattttggaaaacggcaaattgtcagaaggagtaacaataagttacaaatcttactgcaagaacggggtgaatggaacaggggaaaatggaagaaaatgttccaatatttccattggagatgaggttcaatttgaaattagcataacttcaaataagtgtccaaaaaaggattctgacagctttaaaattaggcctctgggctttacggaggaagtagaggttattcttcagtacatctgtgaatgtgaatgccaaagcgaaggcatccctgaaagtcccaagtgtcatgaaggaaatgggacatttgagtgtggcgcgtgcaggtgcaatgaagggcgtgttggtagacattgtgaatgcagcacagatgaagttaacagtgaagacatggatgcttactgcaggaaagaaaacagttcagaaatctgcagtaacaatggagagtgcgtctgcggacagtgtgtttgtaggaagagggataatacaaatgaaatttattctggcaaattctgcgagtgtgataatttcaactgtgatagatccaatggcttaatttgtggaggaaatggtgtttgcaagtgtcgtgtgtgtgagtgcaaccccaactacactggcagtgcatgtgactgttctttggatactagtacttgtgaagccagcaacggacagatctgcaatggccggggcatctgcgagtgtggtgtctgtaagtgtacagatccgaagtttcaagggcaaacgtgtgagatgtgtcagacctgccttggtgtctgtgctgagcataaagaatgtgttcagtgcagagccttcaataaaggagaaaagaaagacacatgcacacaggaatgttcctattttaacattaccaaggtagaaagtcgggacaaattaccccagccggtccaacctgatcctgtgtcccattgtaaggagaaggatgttgacgactgttggttctattttacgtattcagtgaatgggaacaacgaggtcatggttcatgttgtggagaatccagagtgtcccactggtccagacatcattccaattgtagctggtgtggttgctggaattgttcttattggccttgcattactgctgatatggaagcttttaatgataattcatgacagaagggagtttgctaaatttgaaaaggagaaaatgaatgccaaatgggacacgcctggagtgcagtggtgtgatatcagctcactgcaacctctgacttccagattccagcaattctcctgcctcagcctcccgagtacctgggattacagggtgaaaatcctatttataagagtgccgtaacaactgtggtcaatccgaagtatgagggaaaatgagtactgcccgtgcaaatcccacaacactgaatgcaaagtagcaatttccatagtcacagttaggtagctttagggcaatattgccatggttttactcatgtgcaggttttgaaaatgtacaatatgtataatttttaaaatgttttattattttgaaaataatgttgtaattcatgccagggactgacaaaagacttgagacaggatggttattcttgtcagctaaggtcacattgtgcctttttgaccttttcttcctggactattgaaatcaagcttattggattaagtgatatttctatagcgattgaaagggcaatagttaaagtaatgagcatgatgagagtttctgttaatcatgtattaaaactgatttttagctttacaaatatgtcagtttgcagttatgcagaatccaaagtaaatgtcctgctagctagttaaggattgttttaaatctgttattttgctatttgcctgttagacatgactgatgacatatctgaaagacaagtatgttgagagttgctggtgtaaaatacgtttgaaatagttgatctacaaaggccatgggaaaaattcagagagttaggaaggaaaaaccaatagctttaaaacctgtgtgccattttaagagttacttaatgtttggtaacttttatgccttcactttacaaattcaagccttagataaaagaaccgagcaattttctgctaaaaagtccttgatttagcactatttacatacaggccatactttacaaagtatttgctgaatggggaccttttgagttgaatttattttattatttttattttgtttaatgtctggtgctttctatcacctcttctaatcttttaatgtatttgtttgcaattttggggtaagactttttttatgagtactttttctttgaagttttagcggtcaatttgcctttttaatgaacatgtgaagttatactgtggctatgcaacagctctcacctacgcgagtcttactttgagttagtgccataacagaccactgtatgtttacttctcaccatttgagttgcccatcttgtttcacactagtcacattcttgttttaagtgcctttagttttaacagttcactttttacagtgctatttactgaagttatttattaaatatgcctaaaatacttaaatcggatgtcttgactctgatgtattttatcaggttgtgtgcatgaaatttttatagattaaagaagttgaggaaaagcattt

SEQ ID NO: 1173 - DNA, 3852 bp, Homo sapiens
cagtttgatgtactaaaggcttctcgattgggagacaggaaacctgggtgtcagtgccgggtctgccactgaatttctgtgtgacctttgtcagagtactgtacttccagagcgttggtttccacatctaccctataaagcagcctgcatgtttctctcattctctcgttcgaggagttggaggatagctgctgcctgatatgaatttacaaccaattttctggattggactgatcagttcagtttgctgtgtgtttgctcaaacagatgaaaatagatgtttaaaagcaaatgccaaatcatgtggagaatgtatacaagcagggccaaattgtgggtggtgcacaaattcaacatttttacaggaaggaatgcctacttctgcacgatgtgatgatttagaagccttaaaaaagaagggttgccctccagatgacatagaaaatcccagaggctccaaagatataaagaaaaataaaaatgtaaccaaccgtagcaaaggaacagcagagaagctcaagccagaggatattactcagatccaaccacagcagttggttttgcgattaagatcaggggagccacagacatttacattaaaattcaagagagctgaagactatcccattgacctctactaccttatggacctgtcttactcaatgaaagacgatttggagaatgtaaaaagtcttggaacagatctgatgaatgaaatgaggaggattacttcggacttcagaattggatttggctcatttgtggaaaagactgtgatgccttacattagcacaacaccagctaagctcaggaacccttgcacaagtgaacagaactgcaccagcccatttagctacaaaaatgtgctcagtcttactaataaaggagaagtatttaatgaacttgttggaaaacagcgcatatctggaaatttggattctccagaaggtggtttcgatgccatcatgcaagttgcagtttgtggatcactgattggctggaggaatgttacacggctgctggtgttttccacagatgccgggtttcactttgctggagatgggaaacttggtggcattgttttaccaaatgatggacaatgtcacctggaaaataatatgtacacaatgagccattattatgattatccttctattgctcaccttgtccagaaactgagtgaaaataatattcagacaatttttgcagttactgaagaatttcagcctgtttacaaggagctgaaaaacttgatccctaagtcagcagtaggaacattatctgcaaattctagcaatgtaattcagttgatcattgatgcatacaattccctttcctcagaagtcattttggaaaacggcaaattgtcagaaggagtaacaataagttacaaatcttactgcaagaacggggtgaatggaacaggggaaaatggaagaaaatgttccaatatttccattggagatgaggttcaatttgaaattagcataacttcaaataagtgtccaaaaaaggattctgacagctttaaaattaggcctctgggctttacggaggaagtagaggttattcttcagtacatctgtgaatgtgaatgccaaagcgaaggcatccctgaaagtcccaagtgtcatgaaggaaatgggacatttgagtgtggcgcgtgcaggtgcaatgaagggcgtgttggtagacattgtgaatgcagcacagatgaagttaacagtgaagacatggatgcttactgcaggaaagaaaacagttcagaaatctgcagtaacaatggagagtgcgtctgcggacagtgtgtttgtaggaagagggataatacaaatgaaatttattctggcaaattctgcgagtgtgataatttcaactgtgatagatccaatggcttaatttgtggaggaaatggtgtttgcaagtgtcgtgtgtgtgagtgcaaccccaactacactggcagtgcatgtgactgttctttggatactagtacttgtgaagccagcaacggacagatctgcaatggccggggcatctgcgagtgtggtgtctgtaagtgtacagatccgaagtttcaagggcaaacgtgtgagatgtgtcagacctgccttggtgtctgtgctgagcataaagaatgtgttcagtgcagagccttcaataaaggagaaaagaaagacacatgcacacaggaatgttcctattttaacattaccaaggtagaaagtcgggacaaattaccccagccggtccaacctgatcctgtgtcccattgtaaggagaaggatgttgacgactgttggttctattttacgtattcagtgaatgggaacaacgaggtcatggttcatgttgtggagaatccagagtgtcccactggtccagacatcattccaattgtagctggtgtggttgctggaattgttcttattggccttgcattactgctgatatggaagcttttaatgataattcatgacagaagggagtttgctaaatttgaaaaggagaaaatgaatgccaaatgggacacgggtgaaaatcctatttataagagtgccgtaacaactgtggtcaatccgaagtatgagggaaaatgagtactgcccgtgcaaatcccacaacactgaatgcaaagtagcaatttccatagtcacagttaggtagctttagggcaatattgccatggttttactcatgtgcaggttttgaaaatgtacaatatgtataatttttaaaatgttttattattttgaaaataatgttgtaattcatgccagggactgacaaaagacttgagacaggatggttattcttgtcagctaaggtcacattgtgcctttttgaccttttcttcctggactattgaaatcaagcttattggattaagtgatatttctatagcgattgaaagggcaatagttaaagtaatgagcatgatgagagtttctgttaatcatgtattaaaactgatttttagctttacaaatatgtcagtttgcagttatgcagaatccaaagtaaatgtcctgctagctagttaaggattgttttaaatctgttattttgctatttgcctgttagacatgactgatgacatatctgaaagacaagtatgttgagagttgctggtgtaaaatacgtttgaaatagttgatctacaaaggccatgggaaaaattcagagagttaggaaggaaaaaccaatagctttaaaacctgtgtgccattttaagagttacttaatgtttggtaacttttatgccttcactttacaaattcaagccttagataaaagaaccgagcaattttctgctaaaaagtccttgatttagcactatttacatacaggccatactttacaaagtatttgctgaatggggaccttttgagttgaatttattttattatttttattttgtttaatgtctggtgctttctatcacctcttctaatcttttaatgtatttgtttgcaattttggggtaagactttttttatgagtactttttctttgaagttttagcggtcaatttgcctttttaatgaacatgtgaagttatactgtggctatgcaacagctctcacctacgcgagtcttactttgagttagtgccataacagaccactgtatgtttacttctcaccatttgagttgcccatcttgtttcacactagtcacattcttgttttaagtgcctttagttttaacagttcactttttacagtgctatttactgaagttatttattaaatatgcctaaaatacttaaatcggatgtcttgactctgatgtattttatcaggttgtgtgcatgaaatttttatagattaaagaagttgaggaaaagcattt

SEQ ID NO: 1174 - DNA, 3839 bp, Homo sapiens
agccgccgccacccgccgcgcccgacacccgggaggccccgccagcccgcgggagaggcccagcgggagtcgcggaacagcaggcccgagcccaccgcgccgggccccggacgccgcgcggaaaagatgaatttacaaccaattttctggattggactgatcagttcagtttgctgtgtgtttgctcaaacagatgaaaatagatgtttaaaagcaaatgccaaatcatgtggagaatgtatacaagcagggccaaattgtgggtggtgcacaaattcaacatttttacaggaaggaatgcctacttctgcacgatgtgatgatttagaagccttaaaaaagaagggttgccctccagatgacatagaaaatcccagaggctccaaagatataaagaaaaataaaaatgtaaccaaccgtagcaaaggaacagcagagaagctcaagccagaggatattactcagatccaaccacagcagttggttttgcgattaagatcaggggagccacagacatttacattaaaattcaagagagctgaagactatcccattgacctctactaccttatggacctgtcttactcaatgaaagacgatttggagaatgtaaaaagtcttggaacagatctgatgaatgaaatgaggaggattacttcggacttcagaattggatttggctcatttgtggaaaagactgtgatgccttacattagcacaacaccagctaagctcaggaacccttgcacaagtgaacagaactgcaccagcccatttagctacaaaaatgtgctcagtcttactaataaaggagaagtatttaatgaacttgttggaaaacagcgcatatctggaaatttggattctccagaaggtggtttcgatgccatcatgcaagttgcagtttgtggatcactgattggctggaggaatgttacacggctgctggtgttttccacagatgccgggtttcactttgctggagatgggaaacttggtggcattgttttaccaaatgatggacaatgtcacctggaaaataatatgtacacaatgagccattattatgattatccttctattgctcaccttgtccagaaactgagtgaaaataatattcagacaatttttgcagttactgaagaatttcagcctgtttacaaggagctgaaaaacttgatccctaagtcagcagtaggaacattatctgcaaattctagcaatgtaattcagttgatcattgatgcatacaattccctttcctcagaagtcattttggaaaacggcaaattgtcagaaggagtaacaataagttacaaatcttactgcaagaacggggtgaatggaacaggggaaaatggaagaaaatgttccaatatttccattggagatgaggttcaatttgaaattagcataacttcaaataagtgtccaaaaaaggattctgacagctttaaaattaggcctctgggctttacggaggaagtagaggttattcttcagtacatctgtgaatgtgaatgccaaagcgaaggcatccctgaaagtcccaagtgtcatgaaggaaatgggacatttgagtgtggcgcgtgcaggtgcaatgaagggcgtgttggtagacattgtgaatgcagcacagatgaagttaacagtgaagacatggatgcttactgcaggaaagaaaacagttcagaaatctgcagtaacaatggagagtgcgtctgcggacagtgtgtttgtaggaagagggataatacaaatgaaatttattctggcaaattctgcgagtgtgataatttcaactgtgatagatccaatggcttaatttgtggaggaaatggtgtttgcaagtgtcgtgtgtgtgagtgcaaccccaactacactggcagtgcatgtgactgttctttggatactagtacttgtgaagccagcaacggacagatctgcaatggccggggcatctgcgagtgtggtgtctgtaagtgtacagatccgaagtttcaagggcaaacgtgtgagatgtgtcagacctgccttggtgtctgtgctgagcataaagaatgtgttcagtgcagagccttcaataaaggagaaaagaaagacacatgcacacaggaatgttcctattttaacattaccaaggtagaaagtcgggacaaattaccccagccggtccaacctgatcctgtgtcccattgtaaggagaaggatgttgacgactgttggttctattttacgtattcagtgaatgggaacaacgaggtcatggttcatgttgtggagaatccagagtgtcccactggtccagacatcattccaattgtagctggtgtggttgctggaattgttcttattggccttgcattactgctgatatggaagcttttaatgataattcatgacagaagggagtttgctaaatttgaaaaggagaaaatgaatgccaaatgggacacgtctctctctgtcgcccagcctggagtgcagtggtgtgatatcagctcactgcaacctctgacttccagattccagcaattctcctgcctcagcctcccgagtacctgggattacagggtgaaaatcctatttataagagtgccgtaacaactgtggtcaatccgaagtatgagggaaaatgagtactgcccgtgcaaatcccacaacactgaatgcaaagtagcaatttccatagtcacagttaggtagctttagggcaatattgccatggttttactcatgtgcaggttttgaaaatgtacaatatgtataatttttaaaatgttttattattttgaaaataatgttgtaattcatgccagggactgacaaaagacttgagacaggatggttattcttgtcagctaaggtcacattgtgcctttttgaccttttcttcctggactattgaaatcaagcttattggattaagtgatatttctatagcgattgaaagggcaatagttaaagtaatgagcatgatgagagtttctgttaatcatgtattaaaactgatttttagctttacaaatatgtcagtttgcagttatgcagaatccaaagtaaatgtcctgctagctagttaaggattgttttaaatctgttattttgctatttgcctgttagacatgactgatgacatatctgaaagacaagtatgttgagagttgctggtgtaaaatacgtttgaaatagttgatctacaaaggccatgggaaaaattcagagagttaggaaggaaaaaccaatagctttaaaacctgtgtgccattttaagagttacttaatgtttggtaacttttatgccttcactttacaaattcaagccttagataaaagaaccgagcaattttctgttgctgaatggggaccttttgagttgaatttattttattatttttattttgtttaatgtctggtgctttctatcacctcttctaatcttttaatgtatttgtttgcaattttggggtaagactttttttatgagtactttttctttgaagttttagcggtcaatttgcctttttaatgaacatgtgaagttatactgtggctatgcaacagctctcacctacgcgagtcttactttgagttagtgccataacagaccactgtatgtttacttctcaccatttgagttgcccatcttgtttcacactagtcacattcttgttttaagtgcctttagttttaacagttcactttttacagtgctatttactgaagttatttattaaatatgcctaaaatacttaaatcggatgtcttgactctgatgtattttatcaggttgtgtgcatgaaatttttatagattaaagaagttgaggaaaagcattt

SEQ ID NO: 1175 - DNA, 3788 bp, Homo sapiens
gagccagcccagccgcgttccgaacgtgagggtcgccggcctgggcgctgtcacgtcggggctgccggagctgcgggggaccgggcccgaacggcccctgacacctgcggtctcccgccgggctgggcaagcgcagatgaatttacaaccaattttctggattggactgatcagttcagtttgctgtgtgtttgctcaaacagatgaaaatagatgtttaaaagcaaatgccaaatcatgtggagaatgtatacaagcagggccaaattgtgggtggtgcacaaattcaacatttttacaggaaggaatgcctacttctgcacgatgtgatgatttagaagccttaaaaaagaagggttgccctccagatgacatagaaaatcccagaggctccaaagatataaagaaaaataaaaatgtaaccaaccgtagcaaaggaacagcagagaagctcaagccagaggatattactcagatccaaccacagcagttggttttgcgattaagatcaggggagccacagacatttacattaaaattcaagagagctgaagactatcccattgacctctactaccttatggacctgtcttactcaatgaaagacgatttggagaatgtaaaaagtcttggaacagatctgatgaatgaaatgaggaggattacttcggacttcagaattggatttggctcatttgtggaaaagactgtgatgccttacattagcacaacaccagctaagctcaggaacccttgcacaagtgaacagaactgcaccagcccatttagctacaaaaatgtgctcagtcttactaataaaggagaagtatttaatgaacttgttggaaaacagcgcatatctggaaatttggattctccagaaggtggtttcgatgccatcatgcaagttgcagtttgtggatcactgattggctggaggaatgttacacggctgctggtgttttccacagatgccgggtttcactttgctggagatgggaaacttggtggcattgttttaccaaatgatggacaatgtcacctggaaaataatatgtacacaatgagccattattatgattatccttctattgctcaccttgtccagaaactgagtgaaaataatattcagacaatttttgcagttactgaagaatttcagcctgtttacaaggagctgaaaaacttgatccctaagtcagcagtaggaacattatctgcaaattctagcaatgtaattcagttgatcattgatgcatacaattccctttcctcagaagtcattttggaaaacggcaaattgtcagaaggagtaacaataagttacaaatcttactgcaagaacggggtgaatggaacaggggaaaatggaagaaaatgttccaatatttccattggagatgaggttcaatttgaaattagcataacttcaaataagtgtccaaaaaaggattctgacagctttaaaattaggcctctgggctttacggaggaagtagaggttattcttcagtacatctgtgaatgtgaatgccaaagcgaaggcatccctgaaagtcccaagtgtcatgaaggaaatgggacatttgagtgtggcgcgtgcaggtgcaatgaagggcgtgttggtagacattgtgaatgcagcacagatgaagttaacagtgaagacatggatgcttactgcaggaaagaaaacagttcagaaatctgcagtaacaatggagagtgcgtctgcggacagtgtgtttgtaggaagagggataatacaaatgaaatttattctggcaaattctgcgagtgtgataatttcaactgtgatagatccaatggcttaatttgtggaggaaatggtgtttgcaagtgtcgtgtgtgtgagtgcaaccccaactacactggcagtgcatgtgactgttctttggatactagtacttgtgaagccagcaacggacagatctgcaatggccggggcatctgcgagtgtggtgtctgtaagtgtacagatccgaagtttcaagggcaaacgtgtgagatgtgtcagacctgccttggtgtctgtgctgagcataaagaatgtgttcagtgcagagccttcaataaaggagaaaagaaagacacatgcacacaggaatgttcctattttaacattaccaaggtagaaagtcgggacaaattaccccagccggtccaacctgatcctgtgtcccattgtaaggagaaggatgttgacgactgttggttctattttacgtattcagtgaatgggaacaacgaggtcatggttcatgttgtggagaatccagagtgtcccactggtccagacatcattccaattgtagctggtgtggttgctggaattgttcttattggccttgcattactgctgatatggaagcttttaatgataattcatgacagaagggagtttgctaaatttgaaaaggagaaaatgaatgccaaatgggacacgggtgaaaatcctatttataagagtgccgtaacaactgtggtcaatccgaagtatgagggaaaatgagtactgcccgtgcaaatcccacaacactgaatgcaaagtagcaatttccatagtcacagttaggtagctttagggcaatattgccatggttttactcatgtgcaggttttgaaaatgtacaatatgtataatttttaaaatgttttattattttgaaaataatgttgtaattcatgccagggactgacaaaagacttgagacaggatggttattcttgtcagctaaggtcacattgtgcctttttgaccttttcttcctggactattgaaatcaagcttattggattaagtgatatttctatagcgattgaaagggcaatagttaaagtaatgagcatgatgagagtttctgttaatcatgtattaaaactgatttttagctttacaaatatgtcagtttgcagttatgcagaatccaaagtaaatgtcctgctagctagttaaggattgttttaaatctgttattttgctatttgcctgttagacatgactgatgacatatctgaaagacaagtatgttgagagttgctggtgtaaaatacgtttgaaatagttgatctacaaaggccatgggaaaaattcagagagttaggaaggaaaaaccaatagctttaaaacctgtgtgccattttaagagttacttaatgtttggtaacttttatgccttcactttacaaattcaagccttagataaaagaaccgagcaattttctgctaaaaagtccttgatttagcactatttacatacaggccatactttacaaagtatttgctgaatggggaccttttgagttgaatttattttattatttttattttgtttaatgtctggtgctttctatcacctcttctaatcttttaatgtatttgtttgcaattttggggtaagactttttttatgagtactttttctttgaagttttagcggtcaatttgcctttttaatgaacatgtgaagttatactgtggctatgcaacagctctcacctacgcgagtcttactttgagttagtgccataacagaccactgtatgtttacttctcaccatttgagttgcccatcttgtttcacactagtcacattcttgttttaagtgcctttagttttaacagttcactttttacagtgctatttactgaagttatttattaaatatgcctaaaatacttaaatcggatgtcttgactctgatgtattttatcaggttgtgtgcatgaaatttttatagattaaagaagttgaggaaaagcattt

SEQ ID NO: 1176 - DNA, 3670 bp, Homo sapiens
agccgccgccacccgccgcgcccgacacccgggaggccccgccagcccgcgggagaggcccagcgggagtcgcggaacagcaggcccgagcccaccgcgccgggccccggacgccgcgcggaaaagatgaatttacaaccaattttctggattggactgatcagttcagtttgctgtgtgtttgctcaaacagatgaaaatagatgtttaaaagcaaatgccaaatcatgtggagaatgtatacaagcagggccaaattgtgggtggtgcacaaattcaacatttttacaggaaggaatgcctacttctgcacgatgtgatgatttagaagccttaaaaaagaagggttgccctccagatgacatagaaaatcccagaggctccaaagatataaagaaaaataaaaatgtaaccaaccgtagcaaaggaacagcagagaagctcaagccagaggatattactcagatccaaccacagcagttggttttgcgattaagatcaggggagccacagacatttacattaaaattcaagagagctgaagactatcccattgacctctactaccttatggacctgtcttactcaatgaaagacgatttggagaatgtaaaaagtcttggaacagatctgatgaatgaaatgaggaggattacttcggacttcagaattggatttggctcatttgtggaaaagactgtgatgccttacattagcacaacaccagctaagctcaggaacccttgcacaagtgaacagaactgcaccagcccatttagctacaaaaatgtgctcagtcttactaataaaggagaagtatttaatgaacttgttggaaaacagcgcatatctggaaatttggattctccagaaggtggtttcgatgccatcatgcaagttgcagtttgtggatcactgattggctggaggaatgttacacggctgctggtgttttccacagatgccgggtttcactttgctggagatgggaaacttggtggcattgttttaccaaatgatggacaatgtcacctggaaaataatatgtacacaatgagccattattatgattatccttctattgctcaccttgtccagaaactgagtgaaaataatattcagacaatttttgcagttactgaagaatttcagcctgtttacaaggagctgaaaaacttgatccctaagtcagcagtaggaacattatctgcaaattctagcaatgtaattcagttgatcattgatgcatacaattccctttcctcagaagtcattttggaaaacggcaaattgtcagaaggagtaacaataagttacaaatcttactgcaagaacggggtgaatggaacaggggaaaatggaagaaaatgttccaatatttccattggagatgaggttcaatttgaaattagcataacttcaaataagtgtccaaaaaaggattctgacagctttaaaattaggcctctgggctttacggaggaagtagaggttattcttcagtacatctgtgaatgtgaatgccaaagcgaaggcatccctgaaagtcccaagtgtcatgaaggaaatgggacatttgagtgtggcgcgtgcaggtgcaatgaagggcgtgttggtagacattgtgaatgcagcacagatgaagttaacagtgaagacatggatgcttactgcaggaaagaaaacagttcagaaatctgcagtaacaatggagagtgcgtctgcggacagtgtgtttgtaggaagagggataatacaaatgaaatttattctggcaaattctgcgagtgtgataatttcaactgtgatagatccaatggcttaatttgtggaggaaatggtgtttgcaagtgtcgtgtgtgtgagtgcaaccccaactacactggcagtgcatgtgactgttctttggatactagtacttgtgaagccagcaacggacagatctgcaatggccggggcatctgcgagtgtggtgtctgtaagtgtacagatccgaagtttcaagggcaaacgtgtgagatgtgtcagacctgccttggtgtctgtgctgagcataaagaatgtgttcagtgcagagccttcaataaaggagaaaagaaagacacatgcacacaggaatgttcctattttaacattaccaaggtagaaagtcgggacaaattaccccagccggtccaacctgatcctgtgtcccattgtaaggagaaggatgttgacgactgttggttctattttacgtattcagtgaatgggaacaacgaggtcatggttcatgttgtggagaatccagagtgtcccactggtccagacatcattccaattgtagctggtgtggttgctggaattgttcttattggccttgcattactgctgatatggaagcttttaatgataattcatgacagaagggagtttgctaaatttgaaaaggagaaaatgaatgccaaatgggacacgggtgaaaatcctatttataagagtgccgtaacaactgtggtcaatccgaagtatgagggaaaatgagtactgcccgtgcaaatcccacaacactgaatgcaaagtagcaatttccatagtcacagttaggtagctttagggcaatattgccatggttttactcatgtgcaggttttgaaaatgtacaatatgtataatttttaaaatgttttattattttgaaaataatgttgtaattcatgccagggatgcctttttgaccttttcttcctggactattgaaatcaagcttattggattaagtgatatttctatagcgattgaaagggcaatagttaaagtaatgagcatgatgagagtttctgttaatcatgtattaaaactgatttttagctttacaaatatgtcagtttgcagttatgcagaatccaaagtaaatgtcctgctagctagttaaggattgttttaaatctgttattttgctatttgcctgttagacatgactgatgacatatctgaaagacaagtatgttgagagttgctggtgtaaaatacgtttgaaatagttgatctacaaaggccatgggaaaaattcagagagttaggaaggaaaaaccaatagctttaaaacctgtgtgccattttaagagttacttaatgtttggtaacttttatgccttcactttacaaattcaagccttagataaaagaaccgagcaattttctgttgctgaatggggaccttttgagttgaatttattttattatttttattttgtttaatgtctggtgctttctatcacctcttctaatcttttaatgtatttgtttgcaattttggggtaagactttttttatgagtactttttctttgaagttttagcggtcaatttgcctttttaatgaacatgtgaagttatactgtggctatgcaacagctctcacctacgcgagtcttactttgagttagtgccataacagaccactgtatgtttacttctcaccatttgagttgcccatcttgtttcacactagtcacattcttgttttaagtgcctttagttttaacagttcactttttacagtgctatttactgaagttatttattaaatatgcctaaaatacttaaatcggatgtcttgactctgatgtattttatcaggttgtgtgcatgaaatttttatagattaaagaagttgaggaaaagcattt

SEQ ID NO: 1177 - DNA, 3399 bp, Homo sapiens
atgaatttacaaccaattttctggattggactgatcagttcagtttgctgtgtgtttgctcaaacagatgaaaatagatgtttaaaagcaaatgccaaatcatgtggagaatgtatacaagcagggccaaattgtgggtggtgcacaaattcaacatttttacaggaaggaatgcctacttctgcacgatgtgatgatttagaagccttaaaaaagaagggttgccctccagatgacatagaaaatcccagaggctccaaagatataaagaaaaataaaaatgtaaccaaccgtagcaaaggaacagcagagaagctcaagccagaggatattactcagatccaaccacagcagttggttttgcgattaagatcaggggagccacagacatttacattaaaattcaagagagctgaagactatcccattgacctctactaccttatggacctgtcttactcaatgaaagacgatttggagaatgtaaaaagtcttggaacagatctgatgaatgaaatgaggaggattacttcggacttcagaattggatttggctcatttgtggaaaagactgtgatgccttacattagcacaacaccagctaagctcaggaacccttgcacaagtgaacagaactgcaccagcccatttagctacaaaaatgtgctcagtcttactaataaaggagaagtatttaatgaacttgttggaaaacagcgcatatctggaaatttggattctccagaaggtggtttcgatgccatcatgcaagttgcagtttgtggatcactgattggctggaggaatgttacacggctgctggtgttttccacagatgccgggtttcactttgctggagatgggaaacttggtggcattgttttaccaaatgatggacaatgtcacctggaaaataatatgtacacaatgagccattattatgattatccttctattgctcaccttgtccagaaactgagtgaaaataatattcagacaatttttgcagttactgaagaatttcagcctgtttacaaggagctgaaaaacttgatccctaagtcagcagtaggaacattatctgcaaattctagcaatgtaattcagttgatcattgatgcatacaattccctttcctcagaagtcattttggaaaacggcaaattgtcagaaggagtaacaataagttacaaatcttactgcaagaacggggtgaatggaacaggggaaaatggaagaaaatgttccaatatttccattggagatgaggttcaatttgaaattagcataacttcaaataagtgtccaaaaaaggattctgacagctttaaaattaggcctctgggctttacggaggaagtagaggttattcttcagtacatctgtgaatgtgaatgccaaagcgaaggcatccctgaaagtcccaagtgtcatgaaggaaatgggacatttgagtgtggcgcgtgcaggtgcaatgaagggcgtgttggtagacattgtgaatgcagcacagatgaagttaacagtgaagacatggatgcttactgcaggaaagaaaacagttcagaaatctgcagtaacaatggagagtgcgtctgcggacagtgtgtttgtaggaagagggataatacaaatgaaatttattctggcaaattctgcgagtgtgataatttcaactgtgatagatccaatggcttaatttgtggaggaaatggtgtttgcaagtgtcgtgtgtgtgagtgcaaccccaactacactggcagtgcatgtgactgttctttggatactagtacttgtgaagccagcaacggacagatctgcaatggccggggcatctgcgagtgtggtgtctgtaagtgtacagatccgaagtttcaagggcaaacgtgtgagatgtgtcagacctgccttggtgtctgtgctgagcataaagaatgtgttcagtgcagagccttcaataaaggagaaaagaaagacacatgcacacaggaatgttcctattttaacattaccaaggtagaaagtcgggacaaattaccccagccggtccaacctgatcctgtgtcccattgtaaggagaaggatgttgacgactgttggttctattttacgtattcagtgaatgggaacaacgaggtcatggttcatgttgtggagaatccagagtgtcccactggtccagacatcattccaattgtagctggtgtggttgctggaattgttcttattggccttgcattactgctgatatggaagcttttaatgataattcatgacagaagggagtttgctaaatttgaaaaggagaaaatgaatgccaaatgggacacggtaagttacaaaacatccaaaaagcaaagtggcttataaagtaaatgtaatactcctaagacttatgtattagctgtcaggctgattattaaagtcctttctaagtattttattcccccaaaagtttcttactcaaggaatttgcatttagtgaaaaacagaaagcatcctaaatatatcccattgaaacaaaacattgattataagcatgtatattctggttcatgtggccgatatttttatttctttaatgattttgatcctaaatctgccttttcatctaatgtgaagtagaatcctaaataatgttatctgtgtagcaagctattcaatgggaaagctgcttctttctttaaaacaaacaaacaaaaaaaaccttcagtggaaagccaaattccaaaaggttatataccaagcttgtccaactcgcagctcgtcggccaggacatgcagcccagaatagctttgaatgtggccccaacacaaatttgtaaactttcttagaaattgtaattattattattatttttttttggtaactttttttaaagctcatcagctatcgttagtgtattttatgtgtggcccaagacagttcttcttcttgccagtgtggcccagggaagccaaaagattggacacccctgctatatactatatgattccatttagaggacattctggaaaagcaaaactgtaggggcaaaaatcagtggttgctaggggctggaatgggggaaagtgttgaccacagaggggcgtaagggatcttccttgggatgacttgattgtgggtggatttatgtatttgaaaactcacagaactatgtactttaaaaagatgtatgttcctctatgaaaattatatctcagtaaactttggcttataaaaatcttaaaagccctaagtgaccgaaaggttatgttagcattgagtgctttgaaatatggagtcagagggtggggtaaccaaatgttggcctttgtgtattcatcttttgatacaagaaagcaatgccaatcttcagtatttttaaattgtaaatgaattttgtagttcccgaattc

SEQ ID NO: 1178 - DNA, 3850 bp, Homo sapiens
agccgccgccacccgccgcgcccgacacccgggaggccccgccagcccgcgggagaggcccagcgggagtcgcggaacagcaggcccgagcccaccgcgccgggccccggacgccgcgcggaaaagatgaatttacaaccaattttctggattggactgatcagttcagtttgctgtgtgtttgctcaaacagattttctataagaagcatatgctggttttataatctcagaaaagatacgttggagacagtctgtattagcgcttaccatgtagaaggcatactcttccttagatgaaaatagatgtttaaaagcaaatgccaaatcatgtggagaatgtatacaagcagggccaaattgtgggtggtgcacaaattcaacatttttacaggaaggaatgcctacttctgcacgatgtgatgatttagaagccttaaaaaagaagggttgccctccagatgacatagaaaatcccagaggctccaaagatataaagaaaaataaaaatgtaaccaaccgtagcaaaggaacagcagagaagctcaagccagaggatattactcagatccaaccacagcagttggttttgcgattaagatcaggggagccacagacatttacattaaaattcaagagagctgaagactatcccattgacctctactaccttatggacctgtcttactcaatgaaagacgatttggagaatgtaaaaagtcttggaacagatctgatgaatgaaatgaggaggattacttcggacttcagaattggatttggctcatttgtggaaaagactgtgatgccttacattagcacaacaccagctaagctcaggaacccttgcacaagtgaacagaactgcaccagcccatttagctacaaaaatgtgctcagtcttactaataaaggagaagtatttaatgaacttgttggaaaacagcgcatatctggaaatttggattctccagaaggtggtttcgatgccatcatgcaagttgcagtttgtggatcactgattggctggaggaatgttacacggctgctggtgttttccacagatgccgggtttcactttgctggagatgggaaacttggtggcattgttttaccaaatgatggacaatgtcacctggaaaataatatgtacacaatgagccattattatgattatccttctattgctcaccttgtccagaaactgagtgaaaataatattcagacaatttttgcagttactgaagaatttcagcctgtttacaaggagctgaaaaacttgatccctaagtcagcagtaggaacattatctgcaaattctagcaatgtaattcagttgatcattgatgcatacaattccctttcctcagaagtcattttggaaaacggcaaattgtcagaaggagtaacaataagttacaaatcttactgcaagaacggggtgaatggaacaggggaaaatggaagaaaatgttccaatatttccattggagatgaggttcaatttgaaattagcataacttcaaataagtgtccaaaaaaggattctgacagctttaaaattaggcctctgggctttacggaggaagtagaggttattcttcagtacatctgtgaatgtgaatgccaaagcgaaggcatccctgaaagtcccaagtgtcatgaaggaaatgggacatttgagtgtggcgcgtgcaggtgcaatgaagggcgtgttggtagacattgtgaatgcagcacagatgaagttaacagtgaagacatggatgcttactgcaggaaagaaaacagttcagaaatctgcagtaacaatggagagtgcgtctgcggacagtgtgtttgtaggaagagggataatacaaatgaaatttattctggcaaattctgcgagtgtgataatttcaactgtgatagatccaatggcttaatttgtggaggaaatggtgtttgcaagtgtcgtgtgtgtgagtgcaaccccaactacactggcagtgcatgtgactgttctttggatactagtacttgtgaagccagcaacggacagatctgcaatggccggggcatctgcgagtgtggtgtctgtaagtgtacagatccgaagtttcaagggcaaacgtgtgagatgtgtcagacctgccttggtgtctgtgctgagcataaagaatgtgttcagtgcagagccttcaataaagtagaaagtcgggacaaattaccccagccggtccaacctgatcctgtgtcccattgtaaggagaaggatgttgacgactgttggttctattttacgtattcagtgaatgggaacaacgaggtcatggttcatgttgtggagaatccagtgtcccactggtccagacatcattccaattgtagctggtgtggttgctggaattgttcttattggccttgcattactgctgatatggaagcttttaatgataattcatgacagaagggagtttgctaaatttgaaaaggagaaaatgaatgccaaatgggacacgcaagaaaatccgatttacaagagtcctattaataatttcaagaatccaaactacggacgtaaagctggtctctaaattgccggtgaaaatcctatttataagagtgccgtaacaactgtggtcaatccgaagtatgagggaaaatgagtactgcccgtgcaaatcccacaacactgaatgcaaagtagcaatttccatagtcacagttaggtagctttagggcaatattgccatggttttactcatgtgcaggttttgaaaatgtacaatatgtataatttttaaaatgttttattattttgaaaataatgttgtaattcatgccagggactgacaaaagacttgagacaggatggttattcttgtcagctaaggtcacattgtgcctttttgaccttttcttcctggactattgaaatcaagcttattggattaagtgatatttctatagcgattgaaagggcaatagttaaagtaatgagcatgatgagagtttctgttaatcatgtattaaaactgatttttagctttacaaatatgtcagtttgcagttatgcagaatccaaagtaaatgtcctgctagctagttaaggattgttttaaatctgttattttgctatttgcctgttagacatgactgatgacatatctgaaagacaagtatgttgagagttgctggtgtaaaatacgtttgaaatagttgatctacaaaggccatgggaaaaattcagagagttaggaaggaaaaaccaatagctttaaaacctgtgtgccattttaagagttacttaatgtttggtaacttttatgccttcactttacaaattcaagccttagataaaagaaccgagcaattttctgttgctgaatggggaccttttgagttgaatttattttattatttttattttgtttaatgtctggtgctttctatcacctcttctaatcttttaatgtatttgtttgcaattttggggtaagactttttttatgagtactttttctttgaagttttagcggtcaatttgcctttttaatgaacatgtgaagttatactgtggctatgcaacagctctcacctacgcgagtcttactttgagttagtgccataacagaccactgtatgtttacttctcaccatttgagttgcccatcttgtttcacactagtcacattcttgttttaagtgcctttagttttaacagttcactttttacagtgctatttactgaagttatttattaaatatgcctaaaatacttaaatcggatgtcttgactctgatgtattttatcaggttgtgtgcatgaaatttttatagattaaagaagttgaggaaaagcattt

SEQ ID NO: 1179 - DNA, 3768 bp, Homo sapiens
atgaatttacaaccaattttctggattggactgatcagttcagtttgctgtgtgtttgctcaaacagatgaaaatagatgtttaaaagcaaatgccaaatcatgtggagaatgtatacaagcagggccaaattgtgggtggtgcacaaattcaacatttttacaggaaggaatgcctacttctgcacgatgtgatgatttagaagccttaaaaaagaagggttgccctccagatgacatagaaaatcccagaggctccaaagatataaagaaaaataaaaatgtaaccaaccgtagcaaaggaacagcagagaagctcaagccagaggatattactcagatccaaccacagcagttggttttgcgattaagatcaggggagccacagacatttacattaaaattcaagagagctgaagactatcccattgacctctactaccttatggacctgtcttactcaatgaaagacgatttggagaatgtaaaaagtcttggaacagatctgatgaatgaaatgaggaggattacttcggacttcagaattggatttggctcatttgtggaaaagactgtgatgccttacattagcacaacaccagctaagctcaggaacccttgcacaagtgaacagaactgcaccagcccatttagctacaaaaatgtgctcagtcttactaataaaggagaagtatttaatgaacttgttggaaaacagcgcatatctggaaatttggattctccagaaggtggtttcgatgccatcatgcaagttgcagtttgtggatcactgattggctggaggaatgttacacggctgctggtgttttccacagatgccgggtttcactttgctggagatgggaaacttggtggcattgttttaccaaatgatggacaatgtcacctggaaaataatatgtacacaatgagccattattatgattatccttctattgctcaccttgtccagaaactgagtgaaaataatattcagacaatttttgcagttactgaagaatttcagcctgtttacaaggagctgaaaaacttgatccctaagtcagcagtaggaacattatctgcaaattctagcaatgtaattcagttgatcattgatgcatacaattccctttcctcagaagtcattttggaaaacggcaaattgtcagaaggagtaacaataagttacaaatcttactgcaagaacggggtgaatggaacaggggaaaatggaagaaaatgttccaatatttccattggagatgaggttcaatttgaaattagcataacttcaaataagtgtccaaaaaaggattctgacagctttaaaattaggcctctgggctttacggaggaagtagaggttattcttcagtacatctgtgaatgtgaatgccaaagcgaaggcatccctgaaagtcccaagtgtcatgaaggaaatgggacatttgagtgtggcgcgtgcaggtgcaatgaagggcgtgttggtagacattgtgaatgcagcacagatgaagttaacagtgaagacatggatgcttactgcaggaaagaaaacagttcagaaatctgcagtaacaatggagagtgcgtctgcggacagtgtgtttgtaggaagagggataatacaaatgaaatttattctggcaaattctgcgagtgtgataatttcaactgtgatagatccaatggcttaatttgtggaggaaatggtgtttgcaagtgtcgtgtgtgtgagtgcaaccccaactacactggcagtgcatgtgactgttctttggatactagtacttgtgaagccagcaacggacagatctgcaatggccggggcatctgcgagtgtggtgtctgtaagtgtacagatccgaagtttcaagggcaaacgtgtgagatgtgtcagacctgccttggtgtctgtgctgagcataaagaatgtgttcagtgcagagccttcaataaaggagaaaagaaagacacatgcacacaggaatgttcctattttaacattaccaaggtagaaagtcgggacaaattaccccagccggtccaacctgatcctgtgtcccattgtaaggagaaggatgttgacgactgttggttctattttacgtattcagtgaatgggaacaacgaggtcatggttcatgttgtggagaatccagagtgtcccactggtccagacatcattccaattgtagctggtgtggttgctggaattgttcttattggccttgcattactgctgatatggaagcttttaatgataattcatgacagaagggagtttgctaaatttgaaaaggagaaaatgaatgccaaatgggacacgtctctctctgtcgcccagcctggagtgcagtggtgtgatatcagctcactgcaacctctgacttccagattccagcaattctcctgcctcagcctcccgagtacctgggattacagggtgaaaatcctatttataagagtgccgtaacaactgtggtcaatccgaagtatgagggaaaatgagtactgcccgtgcaaatcccacaacactgaatgcaaagtagcaatttccatagtcacagttaggtagctttagggcaatattgccatggttttactcatgtgcaggttttgaaaatgtacaatatgtataatttttaaaatgttttattattttgaaaataatgttgtaattcatgccagggactgacaaaagacttgagacaggatggttattcttgtcagctaaggtcacattgtgcctttttgaccttttcttcctggactattgaaatcaagcttattggattaagtgatatttctatagcgattgaaagggcaatagttaaagtaatgagcatgatgagagtttctgttaatcatgtattaaaactgatttttagctttacaaatatgtcagtttgcagttatgcagaatccaaagtaaatgtcctgctagctagttaaggattgttttaaatctgttattttgctatttgcctgttagacatgactgatgacatatctgaaagacaagtatgttgagagttgctggtgtaaaatacgtttgaaatagttgatctacaaaggccatgggaaaaattcagagagttaggaaggaaaaaccaatagctttaaaacctgtgtgccattttaagagttacttaatgtttggtaacttttatgccttcactttacaaattcaagccttagataaaagaaccgagcaattttctgctaaaaagtccttgatttagcactatttacatacaggccatactttacaaagtatttgctgaatggggaccttttgagttgaatttattttattatttttattttgtttaatgtctggtgctttctatcacctcttctaatcttttaatgtatttgtttgcaattttggggtaagactttttttatgagtactttttctttgaagttttagcggtcaatttgcctttttaatgaacatgtgaagttatactgtggctatgcaacagctctcacctacgcgagtcttactttgagttagtgccataacagaccactgtatgtttacttctcaccatttgagttgcccatcttgtttcacactagtcacattcttgttttaagtgcctttagttttaacagttcactttttacagtgctatttactgaagttatttattaaatatgcctaaaatacttaaatcggatgtcttgactctgatgtattttatcaggttgtgtgcatgaaatttttatagattaaagaagttgaggaaaagcattt

SEQ ID NO: 1180 - DNA, 2516 bp, Homo sapiens
atgaatttacaaccaattttctggattggactgatcagttcagtttgctgtgtgtttgctcaaacagatgaaaatagatgtttaaaagcaaatgccaaatcatgtggagaatgtatacaagcagggccaaattgtgggtggtgcacaaattcaacatttttacaggaaggaatgcctacttctgcacgatgtgatgatttagaagccttaaaaaagaagggttgccctccagatgacatagaaaatcccagaggctccaaagatataaagaaaaataaaaatgtaaccaaccgtagcaaaggaacagcagagaagctcaagccagaggatattactcagatccaaccacagcagttggttttgcgattaagatcaggggagccacagacatttacattaaaattcaagagagctgaagactatcccattgacctctactaccttatggacctgtcttactcaatgaaagacgatttggagaatgtaaaaagtcttggaacagatctgatgaatgaaatgaggaggattacttcggacttcagaattggatttggctcatttgtggaaaagactgtgatgccttacattagcacaacaccagctaagctcaggaacccttgcacaagtgaacagaactgcaccagcccatttagctacaaaaatgtgctcagtcttactaataaaggagaagtatttaatgaacttgttggaaaacagcgcatatctggaaatttggattctccagaaggtggtttcgatgccatcatgcaagttgcagtttgtggatcactgattggctggaggaatgttacacggctgctggtgttttccacagatgccgggtttcactttgctggagatgggaaacttggtggcattgttttaccaaatgatggacaatgtcacctggaaaataatatgtacacaatgagccattattatgattatccttctattgctcaccttgtccagaaactgagtgaaaataatattcagacaatttttgcagttactgaagaatttcagcctgtttacaaggagctgaaaaacttgatccctaagtcagcagtaggaacattatctgcaaattctagcaatgtaattcagttgatcattgatgcatacaattccctttcctcagaagtcattttggaaaacggcaaattgtcagaaggagtaacaataagttacaaatcttactgcaagaacggggtgaatggaacaggggaaaatggaagaaaatgttccaatatttccattggagatgaggttcaatttgaaattagcataacttcaaataagtgtccaaaaaaggattctgacagctttaaaattaggcctctgggctttacggaggaagtagaggttattcttcagtacatctgtgaatgtgaatgccaaagcgaaggcatccctgaaagtcccaagtgtcatgaaggaaatgggacatttgagtgtggcgcgtgcaggtgcaatgaagggcgtgttggtagacattgtgaatgcagcacagatgaagttaacagtgaagacatggatgcttactgcaggaaagaaaacagttcagaaatctgcagtaacaatggagagtgcgtctgcggacagtgtgtttgtaggaagagggataatacaaatgaaatttattctggcaaattctgcgagtgtgataatttcaactgtgatagatccaatggcttaatttgtggaggaaatggtgtttgcaagtgtcgtgtgtgtgagtgcaaccccaactacactggcagtgcatgtgactgttctttggatactagtacttgtgaagccagcaacggacagatctgcaatggccggggcatctgcgagtgtggtgtctgtaagtgtacagatccgaagtttcaagggcaaacgtgtgagatgtgtcagacctgccttggtgtctgtgctgagcataaagaatgtgttcagtgcagagccttcaataaaggagaaaagaaagacacatgcacacaggaatgttcctattttaacattaccaaggtagaaagtcgggacaaattaccccagccggtccaacctgatcctgtgtcccattgtaaggagaaggatgttgacgactgttggttctattttacgtattcagtgaatgggaacaacgaggtcatggttcatgttgtggagaatccagagtgtcccactggtccagacatcattccaattgtagctggtgtggttgctggaattgttcttattggccttgcattactgctgatatggaagcttttaatgataattcatgacagaagggagtttgctaaatttgaaaaggagaaaatgaatgccaaatgggacacgtctctctctgtcgcccagcctggagtgcagtggtgtgatatcagctcactgcaacctctgacttccagattccagcaattctcctgcctcagcctcccgagtacctgggattacagggtgaaaatcctatttataagagtgccgtaacaactgtggtcaatccgaagtatgagggaaaatgagta

SEQ ID NO: 1181 - DNA, 2709 bp, Homo sapiens
atgcttgagttcttcacaagtctcacgtcacttagcgacggtcgggaactcctcagtggtagtttcgggagccattcattcattttattcatttcatcattctttcaacagtcataacgtaggtgacgacgactgactcatctcttaaaagatgtgtgtgtccctcgacaaataacctgtctgcccctatcgttctgtaggaggacggagtcccagagaactacaactcccatcaagcacttgggggatcgccgcggctgagggagagactatggcttaggaaccaccattcgcgtgaggctctgctccccgcgcctgcgcagagtgcagggccacgtcgcttttgctgtaccggggaccacgcgtctcatccatggcttccgcggactcgcgccgggtggcagatggcggcggtgccgggggcaccttccagccctacctagacaccttgcggcaggagctgcagcagacggacccaacgctgttgtcagtagtggtggcggttcttgcggtgctgctgacgctagtcttctggaagttaatccggagcagaaggagcagtcagagagctgttcttcttgttggcctttgtgattccgggaaaacgttgctctttgtcaggttgttaacaggcctttatagagacactcagacgtccattactgacagctgtgctgtatacagagtcaacaataacaggggcaatagtctgaccttgattgaccttcccggccatgagagtttgaggcttcagttcttagagcggtttaagtcttcagccagggctattgtgtttgttgtggatagtgcagcattccagcgagaggtgaaagatgtggctgagtttctgtatcaagtcctcattgacagtatgggtctgaagaatacaccatcattcttaatagcctgcaataagcaagatattgcaatggcaaaatcagcaaagttaattcaacagcagctggagaaagaactcaacaccttacgagttacccgttctgctgcccccagcacactggacagttccagcactgcccctgctcagctggggaagaaaggcaaagagtttgaattctcacagttgcccctcaaagtggagttcctggagtgcagtgccaagggtggaagaggggacgtgggctctgctgacatccaggacttggagaaatggctggctaaaattgcctgagaggcagctctaaagcacaagacctggatgtgtgacacacagttttggaaaaaggtctgtggtagtctggagttgatgaggaaggggtacaagatgtggttagaaacatttctttgttctggaaacaaagtactgttgaaaccagcttggaattttttttttttttttttttaagttcagttctcccttatggctgcctttcaaacaagtaccttttatctgatgcctgtatcttccctttgttaaggtgtaacttgatgtagggtcaaggtttttgtgacaacaggcagactccacacagagaggatatgatgagaatatggccatcacctgaaaagttttcttatcttctgtgcttttggtccctggaaacaaatccgcctatgtatgaagctagttgatttccagttgcactatttccagttgcctctgaagttcacaggcaatacattgtctagtcctttgcgaatttctctgatttgtgggcacagttatgaagtttccccacatgtgaagacaggtacaaaatagcagagccaagcagacagtgggtctattcttcattagctcagtgacttgtccacactcgtcttagcacttacgtttcaaaagcttgtcacaaacccttggagtcattcccagataatagaactggaaatgataaatcccctaatgccaagggtctagtgtgttcttagtggttatactgggaagtgtgtggagatttaggtgctgctctgctgctctggatggctgaaggctcctgggccatcttcatgtgctgcttgaagagctcctattttgtactcctggctagaatgctgtggaacaaatacaaagtgaaaaaagttctctgtagatttctgaagtgcatattcattgatgccaagaaaaaaaaaaagttgcctttttgaagtgatgttttttgctgtcttcttaaacacaaggcttttttgaatgattagtatatttcatggtaaagaaaacagcctgtctggctcaaagcaattaaatagaatgtaatggtgagtacaaatgagtgcacatgtcaggactcaggtctaactccttgtctcctgagcctaaagattgcaacatacacaagaacacactcctattcctaccccacacactcagggacaagcccaactaaagcttacaaggagaccagggtggctctgtccaggggcctctgcctgctgtctcacatgtcccttctggtggtcacttgggctctaggagtatacgtcacctcagaccatctggcagaaatactccaggctcctaccccaaagcacatgtcagccttgctgctggagcacgaagacaatgtaaatgaaacatgaaatggaggagttgtgagaccctgaccctgagtccttacttgaaagctgctgctggtgttctgagtgtcttttggactcttatttcttgcccttttccttattaggcaagcagtaacttaggaagtaggtaagagcaataaatgtgacatgttatgtcatcatagtaggagctca

SEQ ID NO: 1182 - DNA, 975 bp, Homo sapiens
atgcttgagttcttcacaagtctcacgtcacttagcgacggtcgggaactcctcagtggtagtttcgggagccattcattcattttattcatttcatcattctttcaacagtcataacgtaggtgacgacgactgactcatctcttaaaagatgtgtgtgtccctcgacaaataacctgtctgcccctatcgttctgtaggaggacggagtcccagagaactacaactcccatcaagcacttgggggatcgccgcggctgagggagagactatggcttaggaaccaccattcgcgtgaggctctgctccccgcgcctgcgcagagtgcagggccacgtcgcttttgctgtaccggggaccacgcgtctcatccatggcttccgcggactcgcgccgggtggcagatggcggcggtgccgggggcaccttccagccctacctagacaccttgcggcaggagctgcagcagacggacccaacgctgttgtcagtagtggtggcggttcttgcggtgctgctgacgctagtcttctggaagttaatccggagcagaaggagcagtcagagagctgttcttcttgttggcctttgtgattccgggaaaacgttgctctttgtcaggttgttaacaggcctttatagagacactcagacgtccattactgacagctgtgctgtatacagagtcaacaataacaggggcaatagtctgaccttgattgaccttcccggccatgagagtttgaggcttcagttcttagagcggtttaagtcttcagccagggctattgtgtttgttgtggatagtgcagcattccagcgagaggtgaaagatgtggctgagtttctgtatcaagtcctcattgacagtatgggtctgaagaatacaccatcattcttaatagcctgcaataagcaagatattgcaatggcaaaatcagcaaagttaattcaacagcagctggagaaagaact

SEQ ID NO: 1183 - DNA, 2916 bp, Homo sapiens
atgcttgagttcttcacaagtctcacgtcacttagcgacggtcgggaactcctcagtggtagtttcgggagccattcattcattttattcatttcatcattctttcaacagtcataacgtaggtgacgacgactgactcatctcttaaaagatgtgtgtgtccctcgacaaataacctgtctgcccctatcgttctgtaggaggacggagtcccagagaactacaactcccatcaagcacttgggggatcgccgcggctgagggagagactatggcttaggaaccaccattcgcgtgaggctctgctccccgcgcctgcgcagagtgcagggccacgtcgcttttgctgtaccggggaccacgcgtctcatccatggcttccgcggactcgcgccgggtggcagatggcggcggtgccgggggcaccttccagccctacctagacaccttgcggcaggagctgcagcagacggacccaacgctgttgtcagtagtggtggcggttcttgcggtgctgctgacgctagtcttctggaagttaatccggagcagaaggagcagtcagagagctgttcttcttgttggcctttgtgattccgggaaaacgttgctctttgtcaggttgttaacaggcctttatagagacactcagacgtccattactgacagctgtgctgtatacagagtcaacaataacaggggcaatagtctgaccttgattgaccttcccggccatgagagtttgaggcttcagttcttagagcggtttaagtcttcagccagggctattgtgtttgttgtggatagtgcagcattccagcgagaggtgaaagatgtggctgagtttctgtatcaagtcctcattgacagtatgggtctgaagaatacaccatcattcttaatagcctgcaataagcaagatattgcaatggcaaaatcagcaaagttaattcaacagcagctggagaaagaactcaacaccttacgagttacccgttctgctgcccccagcacactggacagttccagcactgcccctgctcagctggggaagaaaggcaaagagtttgaattctcacagttgcccctcaaagtggagttcctggagtgcagtgccaagggtggaagaggggacgtgggctctgctgacatccaggacttggagaaatggctggctaaaattgcctgagaggcagctctaaagcacaagacctggatgtgtgacacacagttttggaaaaaggtctgtggtagtctggagttgatgaggaaggggtacaagatgtggttagaaacatttctttgttctggaaacaaagtactgttgaaaccagcttggaattttttttttttttttttttaagttcagttctcccttatggctgcctttcaaacaagtaccttttatctgatgcctgtatcttccctttgttaaggtgtaacttgatgtagggtcaaggtttttgtgacaacaggcagactccacacagagaggatatgatgagaatatggccatcacctgaaaagttttcttatcttctgtgcttttggtccctggaaacaaatccgcctatgtatgaagctagttgatttccagttgcactatttccagttgcctctgaagttcacaggcaatacattgtctagtcctttgcgaatttctctgatttgtgggcacagttatgaagtttccccacatgtgaagacaggtacaaaatagcagagccaagcagacagtgggtctattcttcattagctcagtgacttgtccacactcgtcttagcacttacgtttcaaaagcttgtcacaaacccttggagtcattcccagataatagaactggaaatgataaatcccctaatgccaagggtctagtgtgttcttagtggttatactgggaagtgtgtggagatttaggtgctgctctgctgctctggatggctgaaggctcctgggccatcttcatgtgctgcttgaagagctcctattttgtactcctggctagaatgctgtggaacaaatacaaagtgaaaaaagttctctgtagatttctgaagtgcatattcattgatgccaagaaaaaaaaaaagttgcctttttgaagtgatgttttttgctgtcttcttaaacacaaggcttttttgaatgattagtatatttcatggtaaagaaaacagcctgtctggctcaaagcaattaaatagaatgtaatggtgagtacaaatgagtgcacatgtcaggactcaggtctaactccttgtctcctgagcctaaagattgcaacatacacaagaacacactcctattcctaccccacacactcagggacaagcccaactaaagcttacaaggagaccagggtggctctgtccaggggagaagccagttatggaacagtgcattgagagccatggtaggagaggcccacagttctctggagcatgcagcaggggcaccccacctggccttgaggatcagggggagtcaaaggataaagcatggggctgatgacgtctgagggagtgtgatcctccatgtatggcctctgcctgctgtctcacatgtcccttctggtggtcacttgggctctaggagtatacgtcacctcagaccatctggcagaaatactccaggctcctaccccaaagcacatgtcagccttgctgctggagcacgaagacaatgtaaatgaaacatgaaatggaggagttgtgagaccctgaccctgagtccttacttgaaagctgctgctggtgttctgagtgtcttttggactcttatttcttgcccttttccttattaggcaagcagtaacttaggaagtaggtaagagcaataaatgtgacatgttatgtcatcatagtaggagctcatgggaataaaagtcagtggcttgatgcttctgttagaggcat

SEQ ID NO: 1184 - DNA, 1745 bp, Homo sapiens
accacgcgtctcatccatggcttccgcggactcgcgccgggtggcagatggcggcggtgccgggggcaccttccagccctacctagacaccttgcggcaggagctgcagcagacggacccaacgctgttgtcagtagtggtggcggttcttgcggtgctgctgacgctagtcttctggaagttaatccggagcagaaggagcagtcagagagctgttcttcttgttggcctttgtgattccgggaaaacgttgctctttgtcaggttgttaacaggcctttatagagacactcagacgtccattactgacagctgtgctgtatacagagtcaacaataacaggggcaatagtctgaccttgattgaccttcccggccatgagagtttgaggcttcagttcttagagcggtttaagtcttcagccagggctattgtgtttgttgtggatagtgcagcattccagcgagaggtgaaagatgtggctgagtttctgtatcaagtcctcattgacagtatgggtctgaagaatacaccatcattcttaatagcctgcaataagcaagatattgcaatggcaaaatcagcaaagttaattcaacagcagctggagaaagaactcaacaccttacgagttacccgttctgctgcccccagcacactggacagttccagcactgcccctgctcagctggggaagaaaggcaaagagtttgaattctcacagttgcccctcaaagtggagttcctggagtgcagtgccaagggtggaagaggggacgtgggctctgctgacatccaggacttggagaaatggctggctaaaattgcctgagaggcagctctaaagcacaagacctggatgtgtgacacacagttttggaaaaaggtctgtggtagtctggagttgatgaggaaggggtacaagatgtggttagaaacatttctttgttctggaaacaaagtactgttgaaaccagcttggaattttttttttttttttttttaagttcagttctcccttatggctgcctttcaaacaagtaccttttatctgatgcctgtatcttccctttgttaaggtgtaacttgatgtagggtcaaggtttttgtgacaacaggcagactccacacagagaggatatgatgagaatatggccatcacctgaaaagttttcttatcttctgtgcttttggtccctggaaacaaatccgcctatgtatgaagctagttgatttccagttgcactatttccagttgcctctgaagttcacaggcaatacattgtctagtcctttgcgaatttctctgatttgtgggcacagttatgaagtttccccacatgtgaagacaggtacaaaatagcagagccaagcagacagtgggtctattcttcattagctcagtgacttgtccacactcgtcttagcacttacgtttcaaaagcttgtcacaaacccttggagtcattcccagataatagaactggaaatgataaatcccctaatgccaagggtctagtgtgttcttagtggttatactgggaagtgtgtggagatttaggtgctgctctgctgctctggatggctgaaggctcctgggccatcttcatgtgctgcttgaagagctcctattttgtactcctggctagaatgctgtggaacaaatacaaagtgaaaaaagttctctgtagatttctgaagtgcatattcattgatgccaagaaaaaaaaaaagttgcctttttg

SEQ ID NO: 1185 - DNA, 4352 bp, Homo sapiens
gcttttcgcttcgcgtggggtgagagcggagcggtggcgatttggggtttggtggcaagcgagggttgggacgggctgggctcagtttttcctggtccggtggaggttctcctgggatcacgcgaaggcggcggccgaggttggctactgagtgcaggagctgcggaggcgcgagcagcgtcttctggtgctgccgttcttagccggtccttcagtagcctgacctgagtgttagtgcttcagaggaacaaaccagtagaccagaacttggtcaggaagtttcaggaagctattggagcagtgttgggatttcccaccaggatgactatgattggctgtgattttagatcttaaatcagaaaactgaaaacatgaaagtagacaggactaaactgaaaaagacacctactgaagctgtggggattgcccttccaagcattaaggcaaaggacaaaataccaaaatggaaatgtaaaataccatatccaaaataaaaggacacatgacaatagccattctaacagcctgcagactgcagagccttaatagacaaactcaaagtttgtaatgatgagcaactcctcttggaactgcagcaaatcaaaacatggaacattggcaagtgtgagttatatcactgggtggatctgttggaccgctttgatggaattctggcagatgctggacaaacagtggagaatatgtcatggatgcttgtatgtgataggccagaaaaagaacagctgaaaatgcttctattggctgtattgaacttcacagccttgctcattgagtacagcttttctcggcatctgtacagttccatagagcatttgacaactttattggcttcctctgatatgcaagtggtgctggcagtccttaaccttctatatgtatttagcaaaagatcaaactatatcacacgtcttggatctgacaagaggactccgctactgacacggctgcagcatttggcagagagctggggtggaaaggagaatggctttggacttgcagaatgttgcagagacttgcaaatgttgaaatatccacccagtgcaaccacactacactttgaattttatgcagatcctggagctgaggtcaaaattgagaagaggacaactagtaatacactacattatattcacatagaacaacttgacaagatttcagaaagtccttctgaaataatggaatctcttaccaaaatgtacagcattcctaaggataagcagatgctgttatttacacatatacgactggcccatggcttttctaatcacaggaagcggttacaagctgttcaggccagactgcatgcaatatctatattagtctattctaatgccttgcaagagtcagcaaacagtatcttgtataatgggttgatagaggagttggtagatgtccttcaaataacagataagcagctcatggaaattaaagctgcttctttacgaacgttaacatcaattgttcatttggagagaactcccaagctcagcagtattattgactgtactggaactgcctcctaccatggatttttgcctgtacttgtgcggaactgcattcaggccatgattgatccttccatggacccatacccccatcagtttgccacagctcttttctcctttttgtaccatctggctagctacgatgctggtggtgaagccttggtctcctgtggaatgatggaagccttactaaaggtcataaagtttcttggtgatgaacaagaccagataacatttgtaaccagagctgtcagagtggttgaccttatcaccaacctggacatggcagcttttcagtctcatagtggtctttctatcttcatctatagacttgagcacgaagtagatttgtgtcgtaaagaatgccctttcgtgatcaagccaaagatccagagacccagtaccactcaagaaggagaagaaatggaaactgatatggatggagttcagtgtattccacaacgagcagcacttctcaagtccatgttgaatttcctcaagaaggccattcaagaccctgctttctcagatggcatacgacatgtgatggatggttctttacctacctctctgaaacacatcatcagcaatgcagaatactatggtccatcactcttcctcctagctactgaagtggtgactgtgtttgtatttcaagagccatcactgctgtcctcactccaggacaatggactgacagatgtcatgctgcatgcactgctcatcaaagatgttcctgctacaagggaagtcctcggttccctcccaaatgtattcagtgcactttgcttgaatgcccgaggtcttcagtcttttgtacaatgtcagccatttgaacgtctcttcaaagttcttctgtctcctgattacctcccagccatgcggaggaggaggagttctgatccccttggggatactgcatccaacctggggagtgctgttgatgagctcatgagacaccagcctaccctcaaaacagatgcaacaactgccatcatcaagttacttgaagaaatctgtaatcttggaagagatcctaaatacatttgtcagaagccatctattcagaaagcggatggtactgctactgctcctcctccaaggtctaatcatgctgcagaagaggcttccagtgaagatgaggaggaagaggaagtacaggccatgcagagctttaattctgcccagcagaatgaaactgagcctaatcagcaggtcgttggtaccgaggaacgtatacctatacccctcatggattacatccttaatgtgatgaaatttgtggaatctattttgagcaacaatacaacagatgaccactgtcaagaatttgtaaaccagaaaggactcttacctttggttaccattttgggtcttcccaatctgcccattgactttcccacatctgctgcctgtcaggctgttgcaggtgtctgcaaatccatattggtaagaaacatctagcgaaatattttacatctctgtatgtattttcattgtgttctcgcttaaggacctctagttaaaaattgataaatttgtgtgttttatattttatactatttcccatagtaaaattatttattttctttgtttttgcatttgcgtgtagttttgccatttgaattcatatgcgtctaaattatttccaggaaagctttctagctttcttcatgttgttatggtactgtttttttgttttaatatgcgcattcactttgcagtgttcgttccttttccccaagctttattagtcataaattgatatgtaatttattgcttaaaatttgccaaaaacagtttctttatttctacaacacctttgatttttgcaagttacttgttcacccctaatgccttcagttagtaattatcattctatttactcaacttgaaagtaccttatgtaatagcattgtatagcatttaagagtgttacagtgacactaaatatttattaattttgtcagtttcctttttaaagctaaatgataaaaaaaaacacaagaaaagctaaatgatattttatgaaatacactctagatcattttgtccgttcctctgttactggacactgaggttgcttttattttagcccctgatgaatactgttataaacttgagtgtataaatagcacttcaagatttgccttttgaatcttttggatatatactttgaagtgacataacttaatcaaatgataattctatttgtgtgtgtgtgtgcttgcatgaaaccttcaaagtacttttccaagattattttccattcctagttagcgccacataaggattgtaatttcaccatttccatgccagatcggtcggtcggtcggtcggtctgtctttctttctttctttctttctttctttctttctttctttctttctttctttctttccttctttccttccttccttccttccttccttccttccttccttccttctttctttctttctttctttctttctttctttctttctttctttctttctgttttcttaaataatagccatccttgaagataaagtagtgcttcgttttcattttgacttgcatttcctaaataattggtggtattgatcataacgtttgatttgtgtacttgagttattgtctatgtgtgcatcctttgctaaacgaatacttgtgttctttattttatatttaatcaaattaagatgtttttctgttcattatcgaatatctctgtatatattgaacaccagcctctttttttcagatacatcacttgcaaatatcctcattttgtcagttgcctgtttgttaccattgacatactaaaggttttgatgctgacc

SEQ ID NO: 1186 - DNA, 4544 bp, Homo sapiens
caggtttattcagtcaccatgaagctgctgctgctgcacccggccttccagagctgcctcctgctgaccctgcttggcttatggagaaccacccctgaggctcacgcttcatccctgggtgcaccagctatcagcgctgcctccttcctgcaggatctaatacatcggtatggcgagggtgacagcctcactctgcagcagctgaaggccctactcaaccacctggatgtgggagtgggccggggtaatgtcacccagcacgtgcaaggacacaggaacctctccacgtgctttagttctggagacctcttcactgcccacaatttcagcgagcagtcgcggattgggagcagcgagctccaggagttctgccccaccatcctccagcagctggattcccgggcctgcacctcggagaaccaggaaaacgaggagaatgagcagacggaggaggggcggccaagcgctgttgaagtgtggggctttggttttctcagtgtctcactgattaacctggcctctctcctgggagtcctcgtcctgccctgcacagagaaagcgtttttcagccgtgtgctcacttacttcatcgccctgtccattggaacgctgctgtctaacgcgctattccagctcatcccagaggcatttggtttcaaccctctggaagattattatgtctccaagtctgcagtggtgtttgggggcttttatcttttctttttcacagagaagatcttgaagattcttcttaagcagaaaaatgagcatcatcatggacacagccattatgcctctgagtcgcttccctccaagaaggaccaggaggagggggtgatggagaagctgcagaacggggacctggaccacatgattcctcagcactgcagcagtgagctggacggcaaggcgcccatggtggacgagaaggtcattgtgggctcgctctctgtgcaggacctgcaggcttcccagagtgcttgctactggctgaaaggtgtccgctactctgatatcggcactctggcctggatgatcactctgagcgacggcctccataatttcatcgatggcctggccatcggtgcttccttcactgtgtcagttttccaaggcatcagcacctcggtggccatcctctgtgaggagttcccacatgagctaggagactttgtcatcctgctcaacgctgggatgagcatccaacaagctctcttcttcaacttcctttctgcctgctgctgctacctgggtctggcctttggcatcctggccggcagccacttctctgccaactggatttttgcgctagctggaggaatgttcttgtatatttctctggctgatatgttccctgagatgaatgaggtctgtcaagaggatgaaaggaagggcagcatcttgattccatttatcatccagaacctgggcctcctgactggattcaccatcatggtggtcctcaccatgtattcaggacagatccagattgggtagggctctgccaagagcctgtgggactggaagtcgggccctgggctgcccgatcgccagcccgaggacttaccatccacaatgcaccacggaagaggccgttctatgaaaaactgacacagactgtattcctgcattcaaatgtcagccgtttgtaaaatgctgtatcctaggaataagctgccctggtaaccagtctctagctagtgcctcttgccctctcctcacctccttttctctcagtgactctggaacctgaatgcagcttacaagacaagcctgacttttttctctgattaccttggcctcctcttggaaccagtgctgaaaggttttgaatcctttacccaacaatgcaaaaatagagccaatggttataacttggctagaaatatcaagagttgaatccatagtgtggggcccatgactctagctgggcaccttggacctccagctggccaatagaagagacaggagacaggaagccttcccattttttcaaagtctgtttaattgcctattacttctctcaaagagaacctgaagtcagaacacatgagcagggtgagaggtgaggcaaggttcatcctgaatgggagaggaagtcgaaccactgctgtgtgtcttgtcaggatgctcacttgttcctactgagatgctggatattgattttgtaacagcacctggtgtttcacggctgtccgagtgagctaacgtggcggtgtggctgcctggacctcctctttcaggttaacgctgacagaatggaggctcaggctgtctgcaagaaaacagttggtttggctgtgattttgacctcctcttccccactgccatcttctaagagactttgtagctgcctcctagaagcacattctgagcacatttgagacctctgtgttagaggggagactgcacaaactatcctcccccaggttgagacgtctgcagagtggcaagctgacttgtagaaatggggtgccatttatgctctacttagacaagggtaatcagaaatggaatcagtgcaggcaaaatttaggatttgccgcttccataaatcaaagcatgactaatagggggtctctgaaatgtaagggcacaaacttcacttagggcatcgcagatgtttgcagaatggttggcctaatgattatgctacagatgggttttaaatgacccgtctaggttactgcttccttgcaaaaaaagtcgaatcctgcattgaattgaatatgaatttctctaactctctccagaaaatggatggagataacttgtctttaaaactgtaggccagccttagccactgtggagcccttgcctccgagctctggcttcaaggggagctcttctccaggttcactaggtgaattgatttattattatcatattgataatgtgagattctttagccactttggggagcctgtctctccagaagcctttcttagtggtgcccacagttggagcccaggggccatgtttgcaaactgattcatgtgcatggctgacaggagtactggttcactaccaatgcctgagcttttctcttacatagaaaaactgtccactctcagtaatcacaagcagcatccgttttgttttctcttcttgggagacatctgtcaaaccaggaatattcttgaaaagaacgtgagcaggaaaaactgctggtgatactttttttaagttttgtttttatcttgcctgttggcttcaatacatttgagaatacgctgaagagggaaaatttcagtgatggagattctagattaaatatcaggactgatttcctggtgggaggattatggtccagttttaccaaagaaccaattccttgaatgttggaatctaactttttatattgtcattattattgttgtttttaaacggttctttgtcttttctgttttatttttctcaagctgctttcaggagctagcagaaaataactcaaagttgaagactctggaagattttgctttaacctaactcgcattgatgtattaaatttataattttagcattcccaatagatcctatcattccttaaacataataccctttgtcttggagtagaatactaagttagagttagtggatttctagtttaggagaggagctcaaaactataatctttaacaaattgaaaaatgaaatagggtgttttccctttttgtgcacacctatattaccttaagaaatttccttccatagacagctgcctcaaagggaaatcctctttaaaccgtagttggcgcagaggtcagtcctagtcggagcttaggaggggcggagacgctcacatcgtctgacttgagtcgccactgattgtggcaacagctttgcctcatgagtcaaaaattggcaatttcttttgatttttagttgttgaatttgctgtttcaagcatttgtacatattagaagtctaaggagtagcaagtcagtgggaggactttttcacccctggcattagcagcttcgacctcattttccagatgcaccagctcctattaataagttagcaaggaaagtgtatgtcacgtgcaggaacagtgaggcagggacaggggttctgctccttctcacttcaccaccggcacacagcttgcccctgtctttgcccccaaaggtattttgtgtctagtgtcacattggagctattcttcactggtccttaaccttgggttttaaaaagaaggcttctctgtttgggtagcgtaagagctgagtatagtaagtcctcttccaaagagatggcaatatgctgggcatctactttaaaacaaagttgtctgatttttgcaagagaggttaggattttattgttcttatttccctttacagttctgcagttccatcacagtatttttttaaataactcaggtgtatgagaagaaattagaaaagaaaattaacttatgtggactgtaaatgttttatttgtaagattctataaataaagctatattctgtaattgttgagaatcccacgggtgatcatttgcaataaatgtggatgtaatgaaggctgttgaacacaag

SEQ ID NO: 1187 - DNA, 4544 bp, Homo sapiens
caggtttattcagtcaccatgaagctgctgctgctgcacccggccttccagagctgcctcctgctgaccctgcttggcttatggagaaccacccctgaggctcacgcttcatccctgggtgcaccagctatcagcgctgcctccttcctgcaggatctaatacatcggtatggcgagggtgacagcctcactctgcagcagctgaaggccctactcaaccacctggatgtgggagtgggccggggtaatgtcacccagcacgtgcaaggacacaggaacctctccacgtgctttagttctggagacctcttcactgcccacaatttcagcgagcagtcgcggattgggagcagcgagctccaggagttctgccccaccatcctccagcagctggattcccgggcctgcacctcggagaaccaggaaaacgaggagaatgagcagacggaggaggggcggccaagcgctgttgaagtgtggggatacggtctcctctgtgtgaccgtcatctccctctgctccctcctgggggccagcgtggtgcccttcatgaagaagaccttttacaagaggctgctgctctacttcatagctctggcgattggaaccctctactccaacgccctcttccagctcatcccggaggcatttggtttcaaccctctggaagattattatgtctccaagtctgcagtggtgtttgggggcttttatcttttctttttcacagagaagatcttgaagattcttcttaagcagaaaaatgagcatcatcatggacacagccattatgcctctgagtcgcttccctccaagaaggaccaggaggagggggtgatggagaagctgcagaacggggacctggaccacatgattcctcagcactgcagcagtgagctggacggcaaggcgcccatggtggacgagaaggtcattgtgggctcgctctctgtgcaggacctgcaggcttcccagagtgcttgctactggctgaaaggtgtccgctactctgatatcggcactctggcctggatgatcactctgagcgacggcctccataatttcatcgatggcctggccatcggtgcttccttcactgtgtcagttttccaaggcatcagcacctcggtggccatcctctgtgaggagttcccacatgagctaggagactttgtcatcctgctcaacgctgggatgagcatccaacaagctctcttcttcaacttcctttctgcctgctgctgctacctgggtctggcctttggcatcctggccggcagccacttctctgccaactggatttttgcgctagctggaggaatgttcttgtatatttctctggctgatatgttccctgagatgaatgaggtctgtcaagaggatgaaaggaagggcagcatcttgattccatttatcatccagaacctgggcctcctgactggattcaccatcatggtggtcctcaccatgtattcaggacagatccagattgggtagggctctgccaagagcctgtgggactggaagtcgggccctgggctgcccgatcgccagcccgaggacttaccatccacaatgcaccacggaagaggccgttctatgaaaaactgacacagactgtattcctgcattcaaatgtcagccgtttgtaaaatgctgtatcctaggaataagctgccctggtaaccagtctctagctagtgcctcttgccctctcctcacctccttttctctcagtgactctggaacctgaatgcagcttacaagacaagcctgacttttttctctgattaccttggcctcctcttggaaccagtgctgaaaggttttgaatcctttacccaacaatgcaaaaatagagccaatggttataacttggctagaaatatcaagagttgaatccatagtgtggggcccatgactctagctgggcaccttggacctccagctggccaatagaagagacaggagacaggaagccttcccattttttcaaagtctgtttaattgcctattacttctctcaaagagaacctgaagtcagaacacatgagcagggtgagaggtgaggcaaggttcatcctgaatgggagaggaagtcgaaccactgctgtgtgtcttgtcaggatgctcacttgttcctactgagatgctggatattgattttgtaacagcacctggtgtttcacggctgtccgagtgagctaacgtggcggtgtggctgcctggacctcctctttcaggttaacgctgacagaatggaggctcaggctgtctgcaagaaaacagttggtttggctgtgattttgacctcctcttccccactgccatcttctaagagactttgtagctgcctcctagaagcacattctgagcacatttgagacctctgtgttagaggggagactgcacaaactatcctcccccaggttgagacgtctgcagagtggcaagctgacttgtagaaatggggtgccatttatgctctacttagacaagggtaatcagaaatggaatcagtgcaggcaaaatttaggatttgccgcttccataaatcaaagcatgactaatagggggtctctgaaatgtaagggcacaaacttcacttagggcatcgcagatgtttgcagaatggttggcctaatgattatgctacagatgggttttaaatgacccgtctaggttactgcttccttgcaaaaaaagtcgaatcctgcattgaattgaatatgaatttctctaactctctccagaaaatggatggagataacttgtctttaaaactgtaggccagccttagccactgtggagcccttgcctccgagctctggcttcaaggggagctcttctccaggttcactaggtgaattgatttattattatcatattgataatgtgagattctttagccactttggggagcctgtctctccagaagcctttcttagtggtgcccacagttggagcccaggggccatgtttgcaaactgattcatgtgcatggctgacaggagtactggttcactaccaatgcctgagcttttctcttacatagaaaaactgtccactctcagtaatcacaagcagcatccgttttgttttctcttcttgggagacatctgtcaaaccaggaatattcttgaaaagaacgtgagcaggaaaaactgctggtgatactttttttaagttttgtttttatcttgcctgttggcttcaatacatttgagaatacgctgaagagggaaaatttcagtgatggagattctagattaaatatcaggactgatttcctggtgggaggattatggtccagttttaccaaagaaccaattccttgaatgttggaatctaactttttatattgtcattattattgttgtttttaaacggttctttgtcttttctgttttatttttctcaagctgctttcaggagctagcagaaaataactcaaagttgaagactctggaagattttgctttaacctaactcgcattgatgtattaaatttataattttagcattcccaatagatcctatcattccttaaacataataccctttgtcttggagtagaatactaagttagagttagtggatttctagtttaggagaggagctcaaaactataatctttaacaaattgaaaaatgaaatagggtgttttccctttttgtgcacacctatattaccttaagaaatttccttccatagacagctgcctcaaagggaaatcctctttaaaccgtagttggcgcagaggtcagtcctagtcggagcttaggaggggcggagacgctcacatcgtctgacttgagtcgccactgattgtggcaacagctttgcctcatgagtcaaaaattggcaatttcttttgatttttagttgttgaatttgctgtttcaagcatttgtacatattagaagtctaaggagtagcaagtcagtgggaggactttttcacccctggcattagcagcttcgacctcattttccagatgcaccagctcctattaataagttagcaaggaaagtgtatgtcacgtgcaggaacagtgaggcagggacaggggttctgctccttctcacttcaccaccggcacacagcttgcccctgtctttgcccccaaaggtattttgtgtctagtgtcacattggagctattcttcactggtccttaaccttgggttttaaaaagaaggcttctctgtttgggtagcgtaagagctgagtatagtaagtcctcttccaaagagatggcaatatgctgggcatctactttaaaacaaagttgtctgatttttgcaagagaggttaggattttattgttcttatttccctttacagttctgcagttccatcacagtatttttttaaataactcaggtgtatgagaagaaattagaaaagaaaattaacttatgtggactgtaaatgttttatttgtaagattctataaataaagctatattctgtaattgttgagaatcccacgggtgatcatttgcaataaatgtggatgtaatgaaggctgttgaacacaag

SEQ ID NO: 1188 - DNA, 1461 bp, Homo sapiens
caggtttattcagtcaccatgaagctgctgctgctgcacccggccttccagagctgcctcctgctgaccctgcttggcttatggagaaccacccctgaggctcacgcttcatccctgggtgcaccagctatcagcgctgcctccttcctgcaggatctaatacatcggtatggcgagggtgacagcctcactctgcagcagctgaaggccctactcaaccacctggatgtgggagtgggccggggtaatgtcacccagcacgtgcaaggacacaggaacctctccacgtgctttagttctggagacctcttcactgcccacaatttcagcgagcagtcgcggattgggagcagcgagctccaggagttctgccccaccatcctccagcagctggattcccgggcctgcacctcggagaaccaggaaaacgaggagaatgagcagacggaggaggggcggccaagcgctgttgaagtgtggggatacggtctcctctgtgtgaccgtcatctccctctgctccctcctgggggccagcgtggtgcccttcatgaagaagaccttttacaagaggctgctgctctacttcatagctctggcgattggaaccctctactccaacgccctcttccagctcatcccggaggcatttggtttcaaccctctggaagattattatgtctccaagtctgcagtggtgtttgggggcttttatcttttctttttcacagagaagatcttgaagattcttcttaagcagaaaaatgagcatcatcatggacacagccattatgcctctgagtcgcttccctccaagaaggaccaggaggagggggtgatggagaagctgcagaacggggacctggaccacatgattcctcagcactgcagcagtgagctggacggcaaggcgcccatggtggacgagaaggtcattgtgggctcgctctctgtgcaggacctgcaggcttcccagagtgcttgctactggctgaaaggtgtccgctactctgatatcggcactctggcctggatgatcactctgagcgacggcctccataatttcatcgatggcctggccatcggtgcttccttcactgtgtcagttttccaaggcatcagcacctcggtggccatcctctgtgaggagttcccacatgagctaggagactttgtcatcctgctcaacgctgggatgagcatccaacaagctctcttcttcaacttcctttctgcctgctgctgctacctgggtctggcctttggcatcctggccggcagccacttctctgccaactggatttttgcgctagctggaggaatgttcttgtatatttctctggctgatatgatggagttttgctctgttgcccaggctggagtgcaatggtgccatctcagctcactgcaacctctgccgcttgggttgaagcgattatcctgtctaagcctcccgagtaac

SEQ ID NO: 1189 - DNA, 4649 bp, Homo sapiens
atgggagcgggcgccgaccacagccagggccgcgaggcgcaggagggcgcaggctggccagtgaggggggtcggcgcgcgtgtctacgcggacgcaccggctaagctgcttctgccgccgccggccgcctgggaccttgcggtgaggctgcgcggggccgaggccgcctccgagcgccaggtttattcagtcaccatgaagctgctgctgctgcacccggccttccagagctgcctcctgctgaccctgcttggcttatggagaaccacccctgaggctcacgcttcatccctgggtgcaccagctatcagcgctgcctccttcctgcaggatctaatacatcggtatggcgagggtgacagcctcactctgcagcagctgaaggccctactcaaccacctggatgtgggagtgggccggggtaatgtcacccagcacgtgcaaggacacaggaacctctccacgtgctttagttctggagacctcttcactgcccacaatttcagcgagcagtcgcggattgggagcagcgagctccaggagttctgccccaccatcctccagcagctggattcccgggcctgcacctcggagaaccaggaaaacgaggagaatgagcagacggaggaggggcggccaagcgctgttgaagtgtggggatacggtctcctctgtgtgaccgtcatctccctctgctccctcctgggggccagcgtggtgcccttcatgaagaagaccttttacaagaggctgctgctctacttcatagctctggcgattggaaccctctactccaacgccctcttccagctcatcccggaggcatttggtttcaaccctctggaagattattatgtctccaagtctgcagtggtgtttgggggcttttatcttttctttttcacagagaagatcttgaagattcttcttaagcagaaaaatgagcatcatcatggacacagccattatgcctctgagtcgcttccctccaagaaggaccaggaggagggggtgatggagaagctgcagaacggggacctggaccacatgattcctcagcactgcagcagtgagctggacggcaaggcgcccatggtggacgagaaggtcattgtgggctcgctctctgtgcaggacctgcaggcttcccagagtgcttgctactggctgaaaggtgtccgctactctgatatcggcactctggcctggatgatcactctgagcgacggcctccataatttcatcgatggcctggccatcggtgcttccttcactgtgtcagttttccaaggcatcagcacctcggtggccatcctctgtgaggagttcccacatgagctaggagactttgtcatcctgctcaacgctgggatgagcatccaacaagctctcttcttcaacttcctttctgcctgctgctgctacctgggtctggcctttggcatcctggccggcagccacttctctgccaactggatttttgcgctagctggaggaatgttcttgtatatttctctggctgatatgttccctgagatgaatgaggtctgtcaagaggatgaaaggaagggcagcatcttgattccatttatcatccagaacctgggcctcctgactggattcaccatcatggtggtcctcaccatgtattcaggacagatccagattgggtagggctctgccaagagcctgtgggactggaagtcgggccctgggctgcccgatcgccagcccgaggacttaccatccacaatgcaccacggaagaggccgttctatgaaaaactgacacagactgtattcctgcattcaaatgtcagccgtttgtaaaatgctgtatcctaggaataagctgccctggtaaccagtctctagctagtgcctcttgccctctcctcacctccttttctctcagtgactctggaacctgaatgcagcttacaagacaagcctgacttttttctctgattaccttggcctcctcttggaaccagtgctgaaaggttttgaatcctttacccaacaatgcaaaaatagagccaatggttataacttggctagaaatatcaagagttgaatccatagtgtggggcccatgactctagctgggcaccttggacctccagctggccaatagaagagacaggagacaggaagccttcccattttttcaaagtctgtttaattgcctattacttctctcaaagagaacctgaagtcagaacacatgagcagggtgagaggtgaggcaaggttcatcctgaatgggagaggaagtcgaaccactgctgtgtgtcttgtcaggatgctcacttgttcctactgagatgctggatattgattttgtaacagcacctggtgtttcacggctgtccgagtgagctaacgtggcggtgtggctgcctggacctcctctttcaggttaacgctgacagaatggaggctcaggctgtctgcaagaaaacagttggtttggctgtgattttgacctcctcttccccactgccatcttctaagagactttgtagctgcctcctagaagcacattctgagcacatttgagacctctgtgttagaggggagactgcacaaactatcctcccccaggttgagacgtctgcagagtggcaagctgacttgtagaaatggggtgccatttatgctctacttagacaagggtaatcagaaatggaatcagtgcaggcaaaatttaggatttgccgcttccataaatcaaagcatgactaatagggggtctctgaaatgtaagggcacaaacttcacttagggcatcgcagatgtttgcagaatggttggcctaatgattatgctacagatgggttttaaatgacccgtctaggttactgcttccttgcaaaaaaagtcgaatcctgcattgaattgaatatgaatttctctaactctctccagaaaatggatggagataacttgtctttaaaactgtaggccagccttagccactgtggagcccttgcctccgagctctggcttcaaggggagctcttctccaggttcactaggtgaattgatttattattatcatattgataatgtgagattctttagccactttggggagcctgtctctccagaagcctttcttagtggtgcccacagttggagcccaggggccatgtttgcaaactgattcatgtgcatggctgacaggagtactggttcactaccaatgcctgagcttttctcttacatagaaaaactgtccgctctcagtaatcacaagcagcatccgttttgttttctcttcttgggagacatctgtcaaaccaggaatattcttgaaaagaacgtgagcaggaaaaactgctggtgatactttttttaagttttgtttttatcttgcctgttggcttcaatacatttgagaatacgctgaagagggaaaatttcagtgatggagattctagattaaatatcaggactgatttcctggtgggattatggtccagttttaccaaagaaccaattccttgaatgttggaatctaactttttatattgtcattattattgttgtttttaaacggttctttgtcttttctgttttatttttctcaagctgctttcaggagctagcagaaaataactcaaagttgaagactctggaagattttgctttaacctaactcgcattgatgtattaaatttataattttagcattcccaatagatcctatcattccttaaacataataccctttgtcttggagtagaatactaagttagagttagtggatttctagtttaggagaggagctcaaaactataatctttaacaaattgaaaaatgaaatagggtgttttccctttttgtgcacacctatattaccttaagaaatttccttccatagacagctgcctcaaagggaaatcctctttaaaccgtagttggcgcagaggtcagtcctagtcggagcttaggaggggcggagacgctcacatcgtctgacttgagtcgccactgattgtggcaacagctttgcctcatgagtcaaaaattggcaatttcttttgatttttagttgttgaatttgctgtttcaagcatttgtacatattagaagtctaaggagtagcaagtcagtgggaggactttttcacccctggcattagcagcttcgacctcattttccagatgcaccagctcctattaataagttagcaaggaaagtgtatgtcacgtgcaggaacagtgaggcagggacaggggttctgctccttctcacttcaccaccggcacacagcttgcccctgtctttgcccccaaaggtattttgtgtctagtgtcaaattggagctattcttcactggtccttaaccttgggttttaaaaagaaggcttctctgtttgggtagcgtaagagctgagtatagtaagtcctcttccaaagagatggcaatatgctgggcatctactttaaaacaaagttgtctgatttttgcaagagaggttaggattttattgttcttatttccctttacagttctgcagttccatcacagtatttttttaaataactcaggtgtatgagaagaaattagaaaagaaaattaacttatgtggactgtaaatgttttatttgtaagattctataaataaagctatattctgt

SEQ ID NO: 1190 - DNA, 4007 bp, Homo sapiens
caggtttattcagtcaccatgaagctgctgctgctgcacccggccttccagagctgcctcctgctgaccctgcttggcttatggagaaccacccctgaggctcacgcttcatccctgggtgcaccagctatcagcgctgcctccttcctgcaggatctaatacatcggtatggcgagggtgacagcctcactctgcagcagctgaaggccctactcaaccacctggatgtgggagtgggccggggtaatgtcacccagcacgtgcaaggacacaggaacctctccacgtgctttagttctggagacctcttcactgcccacaatttcagcgagcagtcgcggattgggagcagcgagctccaggagttctgccccaccatcctccagcagctggattcccgggcctgcacctcggagaaccaggaaaacgaggagaatgagcagacggaggaggggcggccaagcgctgttgaagtgtggggatacggtctcctctgtgtgaccgtcatctccctctgctccctcctgggggccagcgtggtgcccttcatgaagaagaccttttacaagaggctgctgctctacttcatagctctggcgattggaaccctctactccaacgccctcttccagctcatcccggaggcatttggtttcaaccctctggaagattattatgtctccaagtctgcagtggtgtttgggggcttttatcttttctttttcacagagaagatcttgaagattcttcttaagcagaaaaatgagcatcatcatggacacagccattatgcctctgagtcgcttccctccaagaaggaccaggaggagggggtgatggagaagctgcagaacggggacctggaccacatgattcctcagcactgcagcagtgagctggacggcaaggcgcccatggtggacgagaaggtcattgtgggctcgctctctgtgcaggacctgcaggcttcccagagtgcttgctactggctgaaaggtgtccgctactctgatatcggcactctggcctggatgatcactctgagcgacggcctccataatttcatcgatggcctggccatcggtgcttccttcactgtgtcagttttccaaggcatcagcacctcggtggccatcctctgtgaggagttcccacatgagctaggagactttgtcatcctgctcaacgctgggatgagcatccaacaagctctcttcttcaacttcctttctgcctgctgctgctacctgggtctggcctttggcatcctggccggcagccacttctctgccaactggatttttgcgctagctggaggaatgttcttgtatatttctctggctgatatgttccctgagatgaatgaggtctgtcaagaggatgaaaggaagggcagcatcttgattccatttatcatccagaacctgggcctcctgactggattcaccatcatggtggtcctcaccatgtattcaggacagatccagattgggtagggctctgccaagagcctgtgggactggaagtcgggccctgggctgcccgatcgccagcccgaggacttaccatccacaatgcaccacggaagaggccgttctatgaaaaactgacacagactgtattcctgcattcaaatgtcagccgtttgtaaaatgctgtatcctaggaataagctgccctggtaaccagtctctagctagtgcctcttgccctctcctcacctccttttctctcagtgactctggaacctgaatgcagcttacaagacaagcctgacttttttctctgattaccttggcctcctcttggaaccagtgctgaaaggttttgaatcctttacccaacaatgcaaaatgtggggcccatgactctagctgggcaccttggacctccagctggccaatagaagagacaggagacaggaagccttcccattttttcaaagtctgtttaattgcctattacttctctcaaagagaacctgaagtcagaacacatgagcagggtgagaggtgaggcaaggttcatcctgaatgggagaggaagtcgaaccactgctgtgtgtcttgtcaggatgctcacttgttcctactgagatgctggatattgattttgtaacagcacctggtgtttcacggctgtccgagtgagctaacgtggcggtgtggctgcctggacctcctctttcaggttaacgctgacagaatggaggctcaggctgtctgcaagaaaacagttggtttggctgtgattttgacctcctcttccccactgccatcttctaagagactttgtagctgcctcctagaagcacattctgagcacatttgagacctctgtgttagaggggagactgcacaaactatcctcccccaggttgagacgtctgcagagtggcaagctgacttgtagaaatggggtgccatttatgctctacttagacaagggtaatcagaaatggaatcagtgcaggcaaaatttaggatttgccgcttccataaatcaaagcatgactaatagggggtctctgaaatgtaagggcacaaacttcacttagggcatcgcagatgtttgcagaatggttggcctaatgattatgctacagatgggttttaaatgacccgtctaggttactgcttccttgcaaaaaaagtcgaatcctgcattgaattgaatatgaatttctctaactctctccagaaaatggatggagataacttgtctttaaaactgtaggccagccttagccactgtggagcccttgcctccgagctctggcttcaaggggagctcttctccaggttcactaggtgaattgatttattattatcatattgataatgtgagattctttagccactttggggagcctgtctctccagaagcctttcttagtggtgcccacagttggagcccaggggccatgtttgcaaactgattcatgtgcatggctgacaggagtactggttcactaccaatgcctgagcttttctcttacatagaaaaactgtccactctcagtaatcacaagcagcatccgttttgttttctcttcttgggagacatctgtcaaaccaggaatattcttgaaaagaacgtgagcaggaaaaactgctggtgatactttttttaagttttgtttttatcttgcctgttggcttcaatacatttgagaatacgctgaagagggaaaatttcagtgatggagattctagattaaatatcaggactgatttcctggtgggaggattatggtccagttttaccaaagaaccaattccttgaatgttggaatctaactttttatattgtcattattattgttgtttttaaacggttctttgtcttttctgttttatttttctcaagctgctttcaggagctagcagaaaataactcaaagttgaagactctggaagattttgctttaacctaactcgcattgatgtattaaatttataattttagcattcccaatagatcctatcattccttaaacataataccctttgtcttggagtagaatactaagttagagttagtggatttctagtttaggagaggagctcaaaactataatctttaacaaattgaaaaatgaaatagggtgttttccctttttgtgcacacctatattaccttaagaaatttccttccatagacagctgcctcaaagggaaatcctctttaaaccgtagttggcgcagaggtcagtcctagtcggagcttaggaggggcggagacgctcacatcgtctgacttgagtcgccactgattgtggcaacagctttgcctcatgacatttgtacatattagaagtctaaggagtagcaagtcagtgggaggactttttcacccctggcattagcagcttcgacctcattttccagatgcaccagctcctattaataagttagcaaggaaagtgtatgtcacgtgcaggaacagtgaggcagggacaggggttctgctccttctcacttcaccaccggcacacagcttgccc

SEQ ID NO: 1191 - DNA, 4152 bp, Homo sapiens
ggccgcgggaagacccgagagtcattagaagcgcaagatggcgactgcggccgaaacctcggcttcagaacccgaggctgagtccaaggctgggcccaaggctgacggagaggaggatgaggttaaggcggctaggacaaggagaaaggtgttatcgcgggctgtggccgctgcgacatacaagaccatggggccagcgtgggatcagcaggaggaaggcgtgagcgagagcgatggggatgagtacgccatggcttcctccgcggagagctcccccggggagtacgagtgggaatatgacgaagaggaggagaaaaaccagctggagattgagagactggaggagcagttgtctatcaacgtctatgactacaactgccatgtggacttgatcagactgctcaggctggaaggggagcttaccaaggtgaggatggcccgccagaagatgagtgaaatctttcccttgactgaagagctctggctggagtggctgcatgacgagatcagcatggcccaggatggcctggacagagagcacgtgtatgacctctttgagaaagccgtgaaggattacatttgtcctaacatttggctagagtatggccagtactcagttggtgggattggtcagaaaggtggccttgagaaagttcgctccgtgtttgaaagggctctctcgtctgttggtttacatatgaccaaaggactcgccctctgggaggcttaccgagagtttgaaagtgcgattgtggaagctgctcggcttgagaaagtccacagtcttttccggcgacagttggcgatcccactctatgatatggaggccacatttgcagagtatgaagaatggtcagaagacccaataccagagtcagtaattcagaactataacaaagcactacagcagctggagaaatataaaccctatgaagaagcactgttgcaggcagaggcaccaaggctggcagaatatcaagcatatatcgattttgagatgaaaattggcgatcctgctcgcattcagttgatctttgagcgcgccctggtcgagaactgccttgtcccagacttatggatccgttacagtcagtacctagatcgacaactgaaagtaaaggatttggttttatctgtacataaccgcgctattagaaactgcccctggacagttgccttatggagtcggtacctcttggccatggagagacatggagttgatcatcaagtaatttctgtaaccttcgagaaagctttgaatgccggcttcatccaggccactgattatgtggagatttggcaggcataccttgattacctgaggagaagggttgatttcaaacaagactccagtaaagagctggaggagttgagggccgcctttactcgtgccttggagtatctgaagcaggaggtggaagagcgtttcaatgagagtggtgatccaagctgcgtgattatgcagaactgggctaggattgaggctcgactgtgcaataacatgcagaaagctcgggaactctgggatagcatcatgaccagaggaaatgccaagtacgccaacatgtggctagagtattacaacctggaaagagctcatggtgacacccagcactgccggaaggctctgcaccgggccgtccagtgcaccagtgactacccagagcacgtctgcgaagtgttactcaccatggagaggacagaaggttctttagaagattgggatatagctgttcagaaaactgaaacccgattagctcgtgtcaatgagcagagaatgaaggctgcagagaaggaagcagcccttgtgcagcaagaagaagaaaaggctgaacaacggaaaagagctcgggctgagaagaaagcgttaaaaaagaagaaaaagatcagaggcccagagaagcgcggagcagatgaggatgatgagaaagagtggggcgatgatgaagaagagcagccttccaaacgcagaagggtcgagaacagcatccctgcagctggagaaacacaaaatgtagaagtagcagcagggcccgctgggaaatgtgctgccgtagatgtggagcccccttcgaagcagaaggagaaggcagcctccctgaagagggacatgcccaaggtgctgcacgacagcagcaaggacagcatcaccgtctttgtcagcaacctgccctacagcatgcaggagccggacacgaagctcaggccactcttcgaggcctgtggggaggtggtccagatccgacccatcttcagcaaccgtggggatttccgaggttactgctacgtggagtttaaagaagagaaatcagcccttcaggcactggagatggaccggaaaagtgtagaagggaggccaatgtttgtttccccctgtgtggataagagcaaaaaccccgattttaaggtgttcaggtacagcacttccctagagaaacacaagctgttcatctcaggcctgcctttctcctgtactaaagaggaactagaagaaatctgtaaggctcatggcaccgtgaaggacctcaggctggtcaccaaccgggctggcaaaccaaagggcctggcctacgtggagtatgaaaatgaatcccaggcgtcgcaggctgtgatgaagatggacggcatgactatcaaagagaacatcatcaaagtggcaatcagcaaccctcctcagaggaaagttccagagaagccggagaccaggaaggcaccaggtggccccatgcttttgccgcagacatacggagcgagggggaagggaaggacgcagctgtctctactgcctcgtgccctgcagcgcccaagtgctgcagctcctcaggctgagaacggccctgccgcggctcctgcagttgccgccccagcagccaccgaggcacccaagatgtccaatgccgattttgccaagctgtttctgagaaagtgaacgggacgctgggagacaggaaatgccttacttcactctggcccggcggacctcccaccacccagcagtgcactggggatggacaggcctggtgtgctgcgtgctcgcaaccacagatggctcctcggctttagacagaaaggggaaggggttctaagtcaagagcctttcagtgctccctcatattgagggcagtggcagaaaagtgaccactctgcaggctgggcccaggatgtggtgtcctgagatagttttgtatcttaaagactgaggcacagaagcgaaacgagaacacactgtttttgagacacagttgtccaaatgtttctggccagctccggcccctttttgtatgacacttctcttccaccctgcacagcacatgtgcccgtcattcttttaattttaaaagatgaaatggcagatgctagtaattcacagaatggcctcttgtgggggtgggtctgagggaagtcagctataaaacatttgctggagttttgttcaatggggctgtgcatttttatattatgtgtttgtaaatgacatgtcagcccttgtttcatgtttcctaaaagcagaatatttgcaacatttgttttgtataggaattatttgtgccacctgctgtggactgttttctttgcctagtgactagtgacctgtgttgtctaaacatgagtttcagccctttggttttgtttaataccatgtcaaatgcaaacttcaattctccccatttagctttattaaactgacgttctcttcaaaacttcttgctgaatggtactcagatgtgcattcacatacagatgtgttttgaagtgggtgtaccttgctttacctaatagatgtgtaaatagaacttttgtaagtcaaatcccattgtcactttgatttaaattattccagctgtgatgtgtcttcattttatagcagtttgacactggagcttttgagcttttttacctcacatcttttatcaaataatatttactgctttgaaaacagcaacagcattggccagttcagtaggggaagcttgctttattaagacactctggagaaagacgtcagggaatccttgtatatgtcgtgggaatcaactcctcatttatctgttgcgtaagtttaagtttttgtgcatcagtcgggttttctatatttttttaacttaacattttttaatataaccgattaaaaagtagacagaacagtaaaat

SEQ ID NO: 1192 - DNA, 8850 bp, Homo sapiens; identical to SEQ ID NO: 739

SEQ ID NO: 1193 - DNA, 315 bp, Homo sapiens
atggcaaaaatctccggccctacagagactgcgcggtgcattgagtccctgatagctgttttccagaagtatgctggaaaggatggttacaactgcaatctctccaagacggagttcccaagcttcatgaataaagagctggctgcctttacaaagaaccagaaggaccccggtgtccttgaccgcatgaagaaactggctgtcagcagcgatgggtagttagatttcccaaaatttcttaatctgattggtggcctagctgcggcttgccatgactccttcctcaaggctgtcccttcccagaagtggaactga

SEQ ID NO: 1194 - DNA, 488 bp, Homo sapiens
ctcgctcagctccaacatggcaaaaatctccagccctacagagactgagcggtgcatcgagtccctgattgctgtcttccagaagtatgctggaaaggatggttataactacactctctccaagacagagttcctaagcttcatgaatacagaactagctgccttcacaaagaaccagaaggaccctggtgtccttgaccgcatgatgaagaaactggacaccaacagtgatggtcagctagatttctcagaatttcttaatctgattggtggcctagctatggcttgccatgactccttcctcaaggctgtcccttcccagaagcggacctgaggaccccttggccctggccttcaaacccaccccctttccttccagcctttctgtcatcatctccacagcccacccatcccctgagcacactaaccacctcatgcaggccccacctgccaatagtaataaagcaatgtcacttttttaaaacatg

SEQ ID NO: 1195 - DNA, 601 bp, Homo sapiens
gggcaaggctgggccgggaagggcgtgggttgaggagaggctccagacccgcacgccgcgcgcacagagctctcagcgccgctcccagccacagcctcccgcgcctcgctcagctccaacatggcaaaaatctccagccctacagagactgagcggtgcatcgagtccctgattgctgtcttccagaagtatgctggaaaggatggttataactacactctctccaagacagagttcctaagcttcatgaatacagaactagctgccttcacaaagaaccagaaggaccctggtgtccttgaccgcatgatgaagaaactggacaccaacagtgatggtcagctagatttctcagaatttcttaatctgattggtggcctagctatggcttgccatgactccttcctcaaggctgtcccttcccagaagcggacctgaggaccccttggccctggccttcaaacccaccccctttccttccagcctttctgtcatcatctccacagcccacccatcccctgagcacactaaccacctcatgcaggccccacctgccaatagtaataaagcaatgtcacttttttaaaacatgaactagaga

SEQ ID NO: 1196 - DNA, 378 bp, Homo sapiens
atggcaaaaatctccagccctacagagactgagcggtgcattgagtccctgattgctgttttccagaagtatgctggaaaggatggttacaaccgcaatctctccaagacggagttcctaagcttcatgaatacagagctggctgcctttacaaagaaccagaaggaccccggtgtccttgaccgcatgaagaaactggctgtcagcagcgatgggcagttagatttcccaaaatttcttaatctgattggtggcctagctgtggcttgccatgactccttcctcaaggctgtcccctcccagaagtagacctgaggaccccttgggcctggccttcaaacccaccccctttccttccagcctttctgtcatcatctc

SEQ ID NO: 1197 - DNA, 6433 bp, Homo sapiens
tgccggtggcctctgtggccgtccaggctagcggcggcccgcaggcggcggggagaaagactctctcacctggtcttgcggctgtggccaccgccggccaggggtgtggagggcgtgctgccggagacgtccgccgggctctgcagttccgccgggggtcgggcagctatggagccgcggcccacggcgccctcctccggcgccccgggactggccggggtcggggagacgccgtcagccgctgcgctggccgcagccagggtggaactgcccggcacggctgtgccctcggtgccggaggatgctgcgcccgcgagccgggacggcggcggggtccgcgatgagggccccgcggcggccggggacgggctgggcagacccttggggcccaccccgagccagagccgtttccaggtggacctggtttccgagaacgccgggcgggccgctgctgcggcggcggcggcggcggcggcagcggcggcggctggtgctggggcgggggccaagcagacccccgcggacggggaagccagcggcgagagcgagccggctaaaggcagcgaggaagccaagggccgcttccgcgtgaacttcgtggacccagctgcctcctcgtcggctgaagacagcctgtcagatgctgccggggtcggagtcgacgggcccaacgtgagcttccagaacggcggggacacggtgctgagcgagggcagcagcctgcactccggcggcggcggcggcagtgggcaccaccagcactactattatgatacccacaccaacacctactacctgcgcaccttcggccacaacaccatggacgctgtgcccaggatcgatcactaccggcacacagccgcgcagctgggcgagaagctgctccggcctagcctggcggagctccacgacgagctggaaaaggaaccttttgaggatggctttgcaaatggggaagaaagtactccaaccagagatgctgtggtcacgtatactgcagaaagtaaaggagtcgtgaagtttggctggatcaagggtgtattagtacgttgtatgttaaacatttggggtgtgatgcttttcattagattgtcatggattgtgggtcaagctggaataggtctatcagtccttgtaataatgatggccactgttgtgacaactatcacaggattgtctacttcagcaatagcaactaatggatttgtaagaggaggaggagcatattatttaatatctagaagtctagggccagaatttggtggtgcaattggtctaatcttcgcctttgccaacgctgttgcagttgctatgtatgtggttggatttgcagaaaccgtggtggagttgcttaaggaacattccatacttatgatagatgaaatcaatgatatccgaattattggagccattacagtcgtgattcttttaggtatctcagtagctggaatggagtgggaagcaaaagctcagattgttcttttggtgatcctacttcttgctattggtgatttcgtcataggaacatttatcccactggagagcaagaagccaaaagggttttttggttataaatctgaaatatttaatgagaactttgggcccgattttcgagaggaagagactttcttttctgtatttgccatcttttttcctgctgcaactggtattctggctggagcaaatatctcaggtgatcttgcagatcctcagtcagccatacccaaaggaacactcctagccattttaattactacattggtttacgtaggaattgcagtatctgtaggttcttgtgttgttcgagatgccactggaaacgttaatgacactatcgtaacagagctaacaaactgtacttctgcagcctgcaaattaaactttgatttttcatcttgtgaaagcagtccttgttcctatggcctaatgaacaacttccaggtaatgagtatggtgtcaggatttacaccactaatttctgcaggtatattttcagccactctttcttcagcattagcatccctagtgagtgctcccaaaatatttcaggctctatgtaaggacaacatctacccagctttccagatgtttgctaaaggttatgggaaaaataatgaacctcttcgtggctacatcttaacattcttaattgcacttggattcatcttaattgctgaactgaatgttattgcaccaattatctcaaacttcttccttgcatcatatgcattgatcaatttttcagtattccatgcatcacttgcaaaatctccaggatggcgtcctgcattcaaatactacaacatgtggatatcacttcttggagcaattctttgttgcatagtaatgttcgtcattaactggtgggctgcattgctaacatatgtgatagtccttgggctgtatatttatgttacctacaaaaaaccagatgtgaattggggatcctctacacaagccctgacttacctgaatgcactgcagcattcaattcgtctttctggagtggaagaccacgtgaaaaactttaggccacagtgtcttgttatgacaggtgctccaaactcacgtccagctttacttcatcttgttcatgatttcacaaaaaatgttggtttgatgatctgtggccatgtacatatgggtcctcgaagacaagccatgaaagagatgtccatcgatcaagccaaatatcagcgatggcttattaagaacaaaatgaaggcattttatgctccagtacatgcagatgacttgagagaaggtgcacagtatttgatgcaggctgctggtcttggtcgtatgaagccaaacacacttgtccttggatttaagaaagattggttgcaagcagatatgagggatgtggatatgtatataaacttatttcatgatgcttttgacatacaatatggagtagtggttattcgcctaaaagaaggtctggatatatctcatcttcaaggacaagaagaattattgtcatcacaagagaaatctcctggcaccaaggatgtggtagtaagtgtggaatatagtaaaaagtccgatttagatacttccaaaccactcagtgaaaaaccaattacacacaaagttgaggaagaggatggcaagactgcaactcaaccactgttgaaaaaagaatccaaaggccctattgtgcctttaaatgtagctgaccaaaagcttcttgaagctagtacacagtttcagaaaaaacaaggaaagaatactattgatgtctggtggctttttgatgatggaggtttgaccttattgataccttaccttctgacgaccaagaaaaaatggaaagactgtaagatcagagtattcattggtggaaagataaacagaatagaccatgaccggagagcgatggctactttgcttagcaagttccggatagacttttctgatatcatggttctaggagatatcaataccaaaccaaagaaagaaaatattatagcttttgaggaaatcattgagccatacagacttcatgaagatgataaagagcaagatattgcagataaaatgaaagaagatgaaccatggcgaataacagataatgagcttgaactttataagaccaagacataccggcagatcaggttaaatgagttattaaaggaacattcaagcacagctaatattattgtcatgagtctcccagttgcacgaaaaggtgctgtgtctagtgctctctacatggcatggttagaagctctatctaaggacctaccaccaatcctcctagttcgtgggaatcatcagagtgtccttaccttctattcataaatgttctatacagtggacagccctccagaatggtacttcagtgcctagtgtagtaactgaaatcttcaatgacacattaacatcacaatggcgaatggtgacttttctttcacgatttcattaatttgaaagcacacaggaaagttgctccattgataacgtgtatggagacttcggttttagtcaattccatatctcaatcttaatggtgattcttctctgttgaactgaagtttgtgagagtagttttcctttgctacttgaatagcaataaaagcgtgttaactttttgattgatgaaagaagtacaaaaagcctttagccttgaggtgccttctgaaattaaccaaatttcatccatatatcctcttttataaacttatagaatgtcaaactttgccttcaactgtttttatttctagtctcttccactttaaaacaaaatgaacactgcttgtcttcttccattgaccatttagtgttgagtactgtatgtgttttgttaattctataaaggtatctgttagatattaaaggtgagaattagggcaggttaatcaaaaatggggaaggggaaatggtaaccaaaaagtaaccccatggtaaggtttatatgagtatatgtgaatatagagctaggaaaaaaagcccccccaaatacctttttaacccctctgattggctattattactatatttattattatttattgaaaccttagggaagattgaagattcatcccatacttctatataccatgcttaaaaatcacgtcattctttaaacaaaaatactcaagatcatttatatttatttggagagaaaactgtcctaatttagaatttccctcaaatctgagggacttttaagaaatgctaacagatttttctggaggaaatttagacaaaacaatgtcatttagtagaatatttcagtatttaagtggaatttcagtatactgtactatcctttataagtcattaaaataatgtttcatcaaatggttaaatggaccactggtttcttagagaaatgtttttaggcttaattcattcaattgtcaagtacacttagtcttaatacactcaggtttgaacagattattctgaatattaaaatttaatccattcttaatattttaaaacttttgttaagaaaaactgccagtttgtgcttttgaaatgtctgttttgacatcatagtctagtaaaattttgacagtgcatatgtactgttactaaaagctttatatgaaattattaatgtgaagtttttcatttataattcaaggaaggatttcctgaaaacatttcaagggatttatgtctacatatttgtgtgtgtgtgtgtatatatatgtaatatgcatacacagatgcatatgtgtatatataatgaaatttatgttgctggtattttgcattttaaagtgatcaagattcattaggcaaactttggtttaagtaaacatatgttcaaatcagattaacagatacaggtttcatagagaacaaaggtgatcatttgaagggcatgctgtaatttcacacaattttccagttcaaaaatggagaatacttcgcctaaaatactgttaagtgggttaattgatacaagtttctgtggtggaaaatttatgcaggttttcacgaatcctttttttttttttttttttttttgagacggagtctcgctctgttgccacgctggaatgcagtaacgtgatcttggctcactgcgacctccacctccccagttcaagcgattctcctgcctcagcctccctagtagctgggactacgggtgcacgccaccatgcccagctaatttttgtattttgagtagagacagggtttcaccgtgttggctaggatggtgtctatctcttgaccttgtgatccacccgcctcagcctcccagagtgctgggattacaggtgcgagccactgcgcctggctggttttcatgaatcttgatagacatctataacgttattattttcagtggtgtgcagcatttttgcttcatgagtatgacctaggtatagagatctgataacttgaattcagaatattaagaaaatgaagtaactgattttctaaaaaaaaaaaaaaaaaaaatttctacattataactcacagcattgttccattgcaggttttgcaatgtttgggggtaaagacagtagaaatattattcagtaaacaataatgtgtgaacttttaagatggataatagggcatggactgagtgctgctatcttgaaatgtgcacaggtacacttaccttttttttttttttttttaagtttttcccattcaggaaaacaacattgtgatctgtactacaggaaccaaatgtcatgcgtcatacatgtgggtataaagtacataaaatatatctaactattcataatgtggggtgggtaatactgtctgtgaaataatgtaagaagcttttcacttaaaaaaaatgcattactttcacttaacactagacaccaggtcgaaaattttcaaggttatagtacttatttcaacaattcttagagatgctagctagtgttgaattctaatcattgatgatagcttggaaataaataattatgccatggcatttgacagt

SEQ ID NO: 1198 - DNA, 6850 bp, Homo sapiens
tgccggtggcctctgtggccgtccaggctagcggcggcccgcaggcggcggggagaaagactctctcacctggtcttgcggctgtggccaccgccggccaggggtgtggagggcgtgctgccggagacgtccgccgggctctgcagttccgccgggggtcgggcagctatggagccgcggcccacggcgccctcctccggcgccccgggactggccggggtcggggagacgccgtcagccgctgcgctggccgcagccagggtggaactgcccggcacggctgtgccctcggtgccggaggatgctgcgcccgcgagccgggacggcggcggggtccgcgatgagggccccgcggcggccggggacgggctgggcagacccttggggcccaccccgagccagagccgtttccaggtggacctggtttccgagaacgccgggcgggccgctgctgcggcggcggcggcggcggcggcagcggcggcggctggtgctggggcgggggccaagcagacccccgcggacggggaagccagcggcgagagcgagccggctaaaggcagcgaggaagccaagggccgcttccgcgtgaacttcgtggacccagctgcctcctcgtcggctgaagacagcctgtcagatgctgccggggtcggagtcgacgggcccaacgtgagcttccagaacggcggggacacggtgctgagcgagggcagcagcctgcactccggcggcggcggcggcagtgggcaccaccagcactactattatgatacccacaccaacacctactacctgcgcaccttcggccacaacaccatggacgctgtgcccaggatcgatcactaccggcacacagccgcgcagctgggcgagaagctgctccggcctagcctggcggagctccacgacgagctggaaaaggaaccttttgaggatggctttgcaaatggggaagaaagtactccaaccagagatgctgtggtcacgtatactgcagaaagtaaaggagtcgtgaagtttggctggatcaagggtgtattagtacgttgtatgttaaacatttggggtgtgatgcttttcattagattgtcatggattgtgggtcaagctggaataggtctatcagtccttgtaataatgatggccactgttgtgacaactatcacaggattgtctacttcagcaatagcaactaatggatttgtaagaggaggaggagcatattatttaatatctagaagtctagggccagaatttggtggtgcaattggtctaatcttcgcctttgccaacgctgttgcagttgctatgtatgtggttggatttgcagaaaccgtggtggagttgcttaaggaacattccatacttatgatagatgaaatcaatgatatccgaattattggagccattacagtcgtgattcttttaggtatctcagtagctggaatggagtgggaagcaaaagctcagattgttcttttggtgatcctacttcttgctattggtgatttcgtcataggaacatttatcccactggagagcaagaagccaaaagggttttttggttataaatctgaaatatttaatgagaactttgggcccgattttcgagaggaagagactttcttttctgtatttgccatcttttttcctgctgcaactggtattctggctggagcaaatatctcaggtgatcttgcagatcctcagtcagccatacccaaaggaacactcctagccattttaattactacattggtttacgtaggaattgcagtatctgtaggttcttgtgttgttcgagatgccactggaaacgttaatgacactatcgtaacagagctaacaaactgtacttctgcagcctgcaaattaaactttgatttttcatcttgtgaaagcagtccttgttcctatggcctaatgaacaacttccaggtaatgagtatggtgtcaggatttacaccactaatttctgcaggtatattttcagccactctttcttcagcattagcatccctagtgagtgctcccaaaatatttcaggctctatgtaaggacaacatctacccagctttccagatgtttgctaaaggttatgggaaaaataatgaacctcttcgtggctacatcttaacattcttaattgcacttggattcatcttaattgctgaactgaatgttattgcaccaattatctcaaacttcttccttgcatcatatgcattgatcaatttttcagtattccatgcatcacttgcaaaatctccaggatggcgtcctgcattcaaatactacaacatgtggatatcacttcttggagcaattctttgttgcatagtaatgttcgtcattaactggtgggctgcattgctaacatatgtgatagtccttgggctgtatatttatgttacctacaaaaaaccagatgtgaattggggatcctctacacaagccctgacttacctgaatgcactgcagcattcaattcgtctttctggagtggaagaccacgtgaaaaactttaggccacagtgtcttgttatgacaggtgctccaaactcacgtccagctttacttcatcttgttcatgatttcacaaaaaatgttggtttgatgatctgtggccatgtacatatgggtcctcgaagacaagccatgaaagagatgtccatcgatcaagccaaatatcagcgatggcttattaagaacaaaatgaaggcattttatgctccagtacatgcagatgacttgagagaaggtgcacagtatttgatgcaggctgctggtcttggtcgtatgaagccaaacacacttgtccttggatttaagaaagattggttgcaagcagatatgagggatgtggatatgtatataaacttatttcatgatgcttttgacatacaatatggagtagtggttattcgcctaaaagaaggtctggatatatctcatcttcaaggacaagaagaattattgtcatcacaagagaaatctcctggcaccaaggatgtggtagtaagtgtggaatatagtaaaaagtccgatttagatacttccaaaccactcagtgaaaaaccaattacacacaaagttgaggaagaggatggcaagactgcaactcaaccactgttgaaaaaagaatccaaaggccctattgtgcctttaaatgtagctgaccaaaagcttcttgaagctagtacacagtttcagaaaaaacaaggaaagaatactattgatgtctggtggctttttgatgatggaggtttgaccttattgataccttaccttctgacgaccaagaaaaaatggaaagactgtaagatcagagtattcattggtggaaagataaacagaatagaccatgaccggagagcgatggctactttgcttagcaagttccggatagacttttctgatatcatggttctaggagatatcaataccaaaccaaagaaagaaaatattatagcttttgaggaaatcattgagccatacagacttcatgaagatgataaagagcaagatattgcagataaaatgaaagaagatgaaccatggcgaataacagataatgagcttgaactttataagaccaagacataccggcagatcaggttaaatgagttattaaaggaacattcaagcacagctaatattattgtcatgagtctcccagttgcacgaaaaggtgctgtgtctagtgctctctacatggcatggttagaagctctatctaaggacctaccaccaatcctcctagttcgtgggaatcatcagagtgtccttaccttctattcataaatgttctatacagtggacagccctccagaatggtacttcagtgcctagtgtagtaactgaaatcttcaatgacacattaacatcacaatggcgaatggtgacttttctttcacgatttcattaatttgaaagcacacaggaaagttgctccattgataacgtgtatggagacttcggttttagtcaattccatatctcaatcttaatggtgattcttctctgttgaactgaagtttgtgagagtagttttcctttgctacttgaatagcaataaaagcgtgttaactttttgattgatgaaagaagtacaaaaagcctttagccttgaggtgccttctgaaattaaccaaatttcatccatatatcctcttttataaacttatagaatgtcaaactttgccttcaactgtttttatttctagtctcttccactttaaaacaaaatgaacactgcttgtcttcttccattgaccatttagtgttgagtactgtatgtgttttgttaattctataaaggtatctgttagatattaaaggtgagaattagggcaggttaatcaaaaatggggaaggggaaatggtaaccaaaaagtaaccccatggtaaggtttatatgagtatatgtgaatatagagctaggaaaaaaagcccccccaaatacctttttaacccctctgattggctattattactatatttattattatttattgaaaccttagggaagattgaagattcatcccatacttctatataccatgcttaaaaatcacgtcattctttaaacaaaaatactcaagatcatttatatttatttggagagaaaactgtcctaatttagaatttccctcaaatctgagggacttttaagaaatgctaacagatttttctggaggaaatttagacaaaacaatgtcatttagtagaatatttcagtatttaagtggaatttcagtatactgtactatcctttataagtcattaaaataatgtttcatcaaatggttaaatggaccactggtttcttagagaaatgtttttaggcttaattcattcaattgtcaagtacacttagtcttaatacactcaggtttgaacagattattctgaatattaaaatttaatccattcttaatattttaaaacttttgttaagaaaaactgccagtttgtgcttttgaaatgtctgttttgacatcatagtctagtaaaattttgacagtgcatatgtactgttactaaaagctttatatgaaattattaatgtgaagtttttcatttataattcaaggaaggatttcctgaaaacatttcaagggatttatgtctacatatttgtgtgtgtgtgtgtatatatatgtaatatgcatacacagatgcatatgtgtatatataatgaaatttatgttgctggtattttgcattttaaagtgatcaagattcattaggcaaactttggtttaagtaaacatatgttcaaatcagattaacagatacaggtttcatagagaacaaaggtgatcatttgaagggcatgctgtaatttcacacaattttccagttcaaaaatggagaatacttcgcctaaaatactgttaagtgggttaattgatacaagtttctgtggtggaaaatttatgcaggttttcacgaatcctttttttttttttttttttttttgagacggagtctcgctctgttgccacgctggaatgcagtaacgtgatcttggctcactgcgacctccacctccccagttcaagcgattctcctgcctcagcctccctagtagctgggactacgggtgcacgccaccatgcccagctaatttttgtattttgagtagagacagggtttcaccgtgttggctaggatggtgtctatctcttgaccttgtgatccacccgcctcagcctcccagagtgctgggattacaggtgcgagccactgcgcctggctggttttcatgaatcttgatagacatctataacgttattattttcagtggtgtgcagcatttttgcttcatgagtatgacctaggtatagagatctgataacttgaattcagaatattaagaaaatgaagtaactgattttctaaaaaaaaaaaaaaaaaaaatttctacattataactcacagcattgttccattgcaggttttgcaatgtttgggggtaaagacagtagaaatattattcagtaaacaataatgtgtgaacttttaagatggataatagggcatggactgagtgctgctatcttgaaatgtgcacaggtacacttaccttttttttttttttttttaagtttttcccattcaggaaaacaacattgtgatctgtactacaggaaccaaatgtcatgcgtcatacatgtgggtataaagtacataaaatatatctaactattcataatgtggggtgggtaatactgtctgtgaaataatgtaagaagcttttcacttaaaaaaaatgcattactttcacttaacactagacaccaggtcgaaaattttcaaggttatagtacttatttcaacaattcttagagatgctagctagtgttgaagctaaaaatagctttatttatgctgaattgtgatttttttatgccaaattttttttagttctaatcattgatgatagcttggaaataaataattatgccatggcatttgacagttcattattcctataagaattaaattgagtttagagagaatggtggtgttgagctgattattaacagttactgaaatcaaatatttatttgttacattattccatttgtattttaggtttccttttacattctttttatatgcattctgacattacatattttttaagactatggaaataatttaaagatttaagctctggtggatgattatctgctaagtaagtctgaaaatgtaatattttgataatactgtaatatacctgtcacacaaatgcttttctaatgttttaaccttgagtattgcagttgctgctttgtacagaggttactgcaataaaggaagtggattcattaaacct

SEQ ID NO: 1199 - DNA, 6891 bp, Homo sapiens
ggtggcctctgtggccgtccaggctagcggcggcccgcaggcggcggggagaaagactctctcacctggtcttgcggctgtggccaccgccggccaggggtgtggagggcgtgctgccggagacgtccgccgggctctgcagttccgccgggggtcgggcagctatggagccgcggcccacggcgccctcctccggcgccccgggactggccggggtcggggagacgccgtcagccgctgcgctggccgcagccagggtggaactgcccggcacggctgtgccctcggtgccggaggatgctgcgcccgcgagccgggacggcggcggggtccgcgatgagggccccgcggcggccggggacgggctgggcagacccttggggcccaccccgagccagagccgtttccaggtggacctggtttccgagaacgccgggcgggccgctgctgcggcggcggcggcggcggcggcagcggcggcggctggtgctggggcgggggccaagcagacccccgcggacggggaagccagcggcgagagcgagccggctaaaggcagcgaggaagccaagggccgcttccgcgtgaacttcgtggacccagctgcctcctcgtcggctgaagacagcctgtcagatgctgccggggtcggagtcgacgggcccaacgtgagcttccagaacggcggggacacggtgctgagcgagggcagcagcctgcactccggcggcggcggcggcagtgggcaccaccagcactactattatgatacccacaccaacacctactacctgcgcaccttcggccacaacaccatggacgctgtgcccaggatcgatcactaccggcacacagccgcgcagctgggcgagaagctgctccggcctagcctggcggagctccacgacgagctggaaaaggaaccttttgaggatggctttgcaaatggggaagaaagtactccaaccagagatgctgtggtcacgtatactgcagaaagtaaaggagtcgtgaagtttggctggatcaagggtgtattagtacgttgtatgttaaacatttggggtgtgatgcttttcattagattgtcatggattgtgggtcaagctggaataggtctatcagtccttgtaataatgatggccactgttgtgacaactatcacaggattgtctacttcagcaatagcaactaatggatttgtaagaggaggaggagcatattatttaatatctagaagtctagggccagaatttggtggtgcaattggtctaatcttcgcctttgccaacgctgttgcagttgctatgtatgtggttggatttgcagaaaccgtggtggagttgcttaaggaacattccatacttatgatagatgaaatcaatgatatccgaattattggagccattacagtcgtgattcttttaggtatctcagtagctggaatggagtgggaagcaaaagctcagattgttcttttggtgatcctacttcttgctattggtgatttcgtcataggaacatttatcccactggagagcaagaagccaaaagggttttttggttataaatctgaaatatttaatgagaactttgggcccgattttcgagaggaagagactttcttttctgtatttgccatcttttttcctgctgcaactggtattctggctggagcaaatatctcaggtgatcttgcagatcctcagtcagccatacccaaaggaacactcctagccattttaattactacattggtttacgtaggaattgcagtatctgtaggttcttgtgttgttcgagatgccactggaaacgttaatgacactatcgtaacagagctaacaaactgtacttctgcagcctgcaaattaaactttgatttttcatcttgtgaaagcagtccttgttcctatggcctaatgaacaacttccaggtaatgagtatggtgtcaggatttacaccactaatttctgcaggtatattttcagccactctttcttcagcattagcatccctagtgagtgctcccaaaatatttcaggctctatgtaaggacaacatctacccagctttccagatgtttgctaaaggttatgggaaaaataatgaacctcttcgtggctacatcttaacattcttaattgcacttggattcatcttaattgctgaactgaatgttattgcaccaattatctcaaacttcttccttgcatcatatgcattgatcaatttttcagtattccatgcatcacttgcaaaatctccaggatggcgtcctgcattcaaatactacaacatgtggatatcacttcttggagcaattctttgttgcatagtaatgttcgtcattaactggtgggctgcattgctaacatatgtgatagtccttgggctgtatatttatgttacctacaaaaaaccagatgtgaattggggatcctctacacaagccctgacttacctgaatgcactgcagcattcaattcgtctttctggagtggaagaccacgtgaaaaactttaggccacagtgtcttgttatgacaggtgctccaaactcacgtccagctttacttcatcttgttcatgatttcacaaaaaatgttggtttgatgatctgtggccatgtacatatgggtcctcgaagacaagccatgaaagagatgtccatcgatcaagccaaatatcagcgatggcttattaagaacaaaatgaaggcattttatgctccagtacatgcagatgacttgagagaaggtgcacagtatttgatgcaggctgctggtcttggtcgtatgaagccaaacacacttgtccttggatttaagaaagattggttgcaagcagatatgagggatgtggatatgtatataaacttatttcatgatgcttttgacatacaatatggagtagtggttattcgcctaaaagaaggtctggatatatctcatcttcaaggacaagaagaattattgtcatcacaagagaaatctcctggcaccaaggatgtggtagtaagtgtggaatatagtaaaaagtccgatttagatacttccaaaccactcagtgaaaaaccaattacacacaaagttgaggaagaggatggcaagactgcaactcaaccactgttgaaaaaagaatccaaaggccctattgtgcctttaaatgtagctgaccaaaagcttcttgaagctagtacacagtttcagaaaaaacaaggaaagaatactattgatgtctggtggctttttgatgatggaggtttgaccttattgataccttaccttctgacgaccaagaaaaaatggaaagactgtaagatcagagtattcattggtggaaagataaacagaatagaccatgaccggagagcgatggctactttgcttagcaagttccggatagacttttctgatatcatggttctaggagatatcaataccaaaccaaagaaagaaaatattatagcttttgaggaaatcattgagccatacagacttcatgaagatgataaagagcaagatattgcagataaaatgaaagaagatgaaccatggcgaataacagataatgagcttgaactttataagaccaagacataccggcagatcaggttaaatgagttattaaaggaacattcaagcacagctaatattattgtcatgagtctcccagttgcacgaaaaggtgctgtgtctagtgctctctacatggcatggttagaagctctatctaaggacctaccaccaatcctcctagttcgtgggaatcatcagagtgtccttaccttctattcataaatgttctatacagtggacagccctccagaatggtacttcagtgcctagtgtagtaactgaaatcttcaatgacacattaacatcacaatggcgaatggtgacttttctttcacgatttcattaatttgaaagcacacaggaaagttgctccattgataacgtgtatggagacttcggttttagtcaattccatatctcaatcttaatggtgattcttctctgttgaactgaagtttgtgagagtagttttcctttgctacttgaatagcaataaaagcgtgttaactttttgattgatgaaagaagtacaaaaagcctttagccttgaggtgccttctgaaattaaccaaatttcatccatatatcctcttttataaacttatagaatgtcaaactttgccttcaactgtttttatttctagtctcttccactttaaaacaaaatgaacactgcttgtcttcttccattgaccatttagtgttgagtactgtatgtgttttgttaattctataaaggtatctgttagatattaaaggtgagaattagggcaggttaatcaaaaatggggaaggggaaatggtaaccaaaaagtaaccccatggtaaggtttatatgagtatatgtgaatatagagctaggaaaaaaagcccccccaaatacctttttaacccctctgattggctattattactatatttattattatttattgaaaccttagggaagattgaagattcatcccatacttctatataccatgcttaaaaatcacgtcattctttaaacaaaaatactcaagatcatttatatttatttggagagaaaactgtcctaatttagaatttccctcaaatctgagggacttttaagaaatgctaacagatttttctggaggaaatttagacaaaacaatgtcatttagtagaatatttcagtatttaagtggaatttcagtatactgtactatcctttataagtcattaaaataatgtttcatcaaatggttaaatggaccactggtttcttagagaaatgtttttaggcttaattcattcaattgtcaagtacacttagtcttaatacactcaggtttgaacagattattctgaatattaaaatttaatccattcttaatattttaaaacttttgttaagaaaaactgccagtttgtgcttttgaaatgtctgttttgacatcatagtctagtaaaattttgacagtgcatatgtactgttactaaaagctttatatgaaattattaatgtgaagtttttcatttataattcaaggaaggatttcctgaaaacatttcaagggatttatgtctacatatttgtgtgtgtgtgtgtatatatatgtaatatgcatacacagatgcatatgtgtatatataatgaaatttatgttgctggtattttgcattttaaagtgatcaagattcattaggcaaactttggtttaagtaaacatatgttcaaaatcagattaacagatacaggtttcatagagaacaaaggtgatcatttgaagggcatgctgtaatttcacacaattttccagttcaaaaatggagaatacttcgcctaaaatactgttaagtgggttaattgatacaagtttctgtggtggaaaatttatgcaggttttcacgaatccttttttttttttttttttttttttgagacggagtcttgctctgttgccacgctggaatgcagtaacgtgatcttggctcactgcgacctccacctccccagttcaagcgattctcctgcctcagcctccctagtagctgggactacgggtgcacgccaccatgcccagctaatttttgtattttgagtagagacagggtttcaccgtgttggctaggatggtgtctatctcttgaccttgtgatccacccgcctcagcctcccagagtgctgggattacaggtgcgagccactgcgcctggctggttttcatgaatcttgatagacatctataacgttattattttcagtggtgtgcagcatttttgcttcatgagtatgacctaggtatagagatctgataacttgaattcagaatattaagaaaatgaagtaactgattttctaaaaaaaaaaaaaaaaaaaatttctacattataactcacagcattgttccattgcaggttttgcaatgtttgggggtaaagacagtagaaatattattcagtaaacaataatgtgtgaacttttaagatggataatagggcatggactgagtgctgctatcttgaaatgtgcacaggtacacttaccttttttttttttttttttaagtttttcccattcaggaaaacaacattgtgatctgtactacaggaaccaaatgtcatgcgtcatacatgtgggtataaagtacataaaatatatctaactattcataatgtggggtgggtaatactgtctgtgaaataatgtaagaagcttttcacttaaaaaaaatgcattactttcacttaacactagacaccaggtcgaaaattttcaaggttatagtacttatttcaacaattcttagagatgctagctagtgttgaagctaaaaatagctttatttatgctgaattgtgatttttttatgccaaattttttttagttctaatcattgatgatagcttggaaataaataattatgccatggcatttgacagttcattattcctataagaattaaattgagtttagagagaatggtggtgttgagctgattattaacagttactgaaatcaaatatttatttgttacattattccatttgtattttaggtttccttttacattctttttatatgcattctgacattacatattttttaagactatggaaataatttaaagatttaagctctggtggatgattatctgctaagtaagtctgaaaatgtaatattttgataatactgtaatatacctgtcacacaaatgcttttctaatgttttaaccttgagtattgcagttgctgctttgtacagaggttactgcaataaaggaagtggattcattaaacctatttaatgtccaaaaaaaaaaaaaaaaaaaaaaaaaaaaaaaa

SEQ ID NO: 1200 - DNA, 2443 bp, Homo sapiens
agcgcggcgcgggcccaacgagcgcacgcgtacacgcgtgcgcaggggaagaccgagtgccaggggctgaaccgcagggaagggggcgcggcgcacgcagtatggcgcccaacatctacttggttcgccagcggatcagtcgactcggccagaggatgtccggcttccagatcaacctcaacccgctcaaggagccactcggcttcatcaaggtcctcgagtggattgcttctatctttgcttttgccacctgtggaggttttaagggccaaacagaaattcaagtgaattgtcctcctgcagttactgagaataaaactgttacagctacttttggttatccattcaggttgaatgaggcatcatttcagccacctccaggtgtaaacatatgtgatgtaaattggaaagattacgtcctcataggcgattactcttcttctgcacaattctatgttacctttgcagtctttgtgttcctgtactgcattgctgcccttctgctttatgttggctacacgagtctgtatctggatagtcgtaaacttcctatgatagactttgttgttacacttgttgccacttttttgtggttggtgagcacttcagcctgggctaaagctctgacagatattaaaatagctactggtcacaatattattgatgaacttccgccttgtaagaagaaagcagtactgtgttactttggctctgtgaccagtatgggatccctaaatgtatctgtgatatttggctttctaaatatgatactctggggaggaaatgcttggtttgtgtacaaggagaccagcctacacagtccatcaaatacatctgcccctcatagccaaggaggtattccacctcctaccggaatataattaaagggagaaatacactgtatgaagtatatgttgatactatgacatgttgccaacaccttgagaagcattatttgtttctaataaaagtaatggctttgtcaatatattggtgggtttaaaactttgctgcttttttacataaagcctgtgcctttcctagaaagttaagatgtaaatgtattctcacatgtaaatttgaaagttcaggggtctattatgaaatgatacacatttttaaatgaaccataatttttttcactaagctgtttgccttccaaagtgtttacaccttaagccttaacatgtatcttcattcagaaaacagttatattgtcataccatagtaggaagaaaaacctttatttggaatatacactactgtaagtttgtacagatcatatacctaccacctgtctttgcttaaagagccttgattacataaatatgtaggaaaaaacatattgagttcaaaatttatatctaacattgtttatgttatgatttttttttaattgcaaagactaggtgtatatttttttctgtttttctaaatgacccgtggtacttaataggtgtactaaaattgtgttgggagcagggatttggaaatttctgagagatgtgtagttaatttagtaattctgtttcatgagatatgatctgttatgctagtggtttaataggcttgctatgtaagtagaacgtggctcaactagatatctttatatgtatgggcatagtacagtaaaataatccaccgttttttacagaccctagtcaaagggttaaaaaaattaagattgctttccatgtttgaaatttaccattgagagtcaatgaagttgctattttgagtttagcattgatattgtgaaaataagtgcaatttggatttcatgtttcttaatattcattcttgtttcacaaatgaatgattaaggaattatgcatcataaaggaacctaagtgaggtatatgatgagtgtattgtctttgcacacacatataggtatattctgaatacaagcttattcacattttgcttcctaatctttttgttgtacagggattcaggtttcttattcttacaacatgattgtttatatgtgaagcacatcttgctgttgccttatttttgatgcttttattcatgacaagaattgtcaatataagaatgtatatcttttttgcaaccaatttaataaaggagttgaaagaaagagtgcactgattgttaatattacaaagaaaccttcatcttaaaggcattgagcagtgcaaaacagaactgattttcaaagcaggaaatagaatcacagttttaatgtttggcaaggaataaaacagacagaaatgctttggagactatggttctatccttttttcttccgacctcatttagaaaatacttatttgcaactcttagattgttttcctgatataccttttctcattaattgtctaattaactagcaaagattcctgcttaagagtgtgtgctctgcaaccaaactgcctagatttgaatcttgtctacaccacttactagctgtttaact

SEQ ID NO: 1201 - DNA, 2520 bp, Homo sapiens
agcgcggcgcgggcccaacgagcgcacgcgtacacgcgtgcgcaggggaagaccgagtgccaggggctgaaccgcagggaagggggcgcggcgcacgcagtatggcgcccaacatctacttggttcgccagcggatcagtcgactcggccagaggatgtccggcttccagatcaacctcaacccgctcaaggagccactcggcttcatcaaggtcctcgagtggattgcttctatctttgcttttgccacctgtggaggttttaagggccaaacagaaattcaagtgaattgtcctcctgcagttactgagaataaaactgttacagctacttttggttatccattcaggttgaatgaggcatcatttcagccacctccaggtgtaaacatatgtgatgtaaattggaaagattacgtcctcataggcgattactcttcttctgcacaattctatgttacctttgcagtctttgtgttcctgtactgcattgctgcccttctgctttatgttggctacacgagtctgtatctggatagtcgtaaacttcctatgatagactttgttgttacacttgttgccacttttttgtggttggtgagcacttcagcctgggctaaagctctgacagatattaaaatagctactggtcacaatattattgatgaacttccgccttgtaagaagaaagcagtactgtgttactttggctctgtgaccagtatgggatccctaaatgtatctgtgatatttggctttctaaatatgatactctggggaggaaatgcttggtttgtgtacaaggagaccagcctacacagtccatcaaatacatctgcccctcatagccaaggaggtattccacctcctaccggaatataattaaagggagaaatacactgtatgaagtatatgttgatactatgacatgttgccaacaccttgagaagcattatttgtttctaataaaagtaatggctttgtcaatatattggtgggtttaaaactttgctgcttttttacataaagcctgtgcctttcctagaaagttaagatgtaaatgtattctcacatgtaaatttgaaagttcaggggtctattatgaaatgatacacatttttaaatgaaccataatttttttcactaagctgtttgccttccaaagtgtttacaccttaagccttaacatgtatcttcattcagaaaacagttatattgtcataccatagtaggaagaaaaacctttatttggaatatacactactgtaagtttgtacagatcatatacctaccacctgtctttgcttaaagagccttgattacataaatatgtaggaaaaaacatattgagttcaaaatttatatctaacattgtttatgttatgatttttttttaattgcaaagactaggtgtatatttttttctgtttttctaaatgacccgtggtacttaataggtgtactaaaattgtgttgggagcagggatttggaaatttctgagagatgtgtagttaatttagtaattctgtttcatgagatatgatctgttatgctagtggtttaataggcttgctatgtaagtagaacgtggctcaactagatatctttatatgtatgggcattactcttagtgatatttgtttcctgtcctttgttgctcatgctgtttaagtgcaggctgagacccagcctctttgtaagtacagtaaaataatccaccgttttttacagaccctagtcaaagggttaaaaaaattaagattgctttccatgtttgaaatttaccattgagagtcaatgaagttgctattttgagtttagcattgatattgtgaaaataagtgcaatttggatttcatgtttcttaatattcattcttgtttcacaaatgaatgattaaggaattatgcatcataaaggaacctaagtgaggtatatgatgagtgtattgtctttgcacacacatataggtatattctgaatacaagcttattcacattttgcttcctaatctttttgttgtacagggattcaggtttcttattcttacaacatgattgtttatatgtgaagcacatcttgctgttgccttatttttgatgcttttattcatgacaagaattgtcaatataagaatgtatatcttttttgcaaccaatttaataaaggagttgaaagaaagagtgcactgattgttaatattacaaagaaaccttcatcttaaaggcattgagcagtgcaaaacagaactgattttcaaagcaggaaatagaatcacagttttaatgtttggcaaggaataaaacagacagaaatgctttggagactatggttctatccttttttcttccgacctcatttagaaaatacttatttgcaactcttagattgttttcctgatataccttttctcattaattgtctaattaactagcaaagattcctgcttaagagtgtgtgctctgcaaccaaactgcctagatttgaatcttgtctacaccacttactagctgtttaact

SEQ ID NO: 1202 - DNA, 2483 bp, Homo sapiens
cgagcccggccagcgcgccagccccgcctgcccttcctcgccaccgggctgctctggtctcgtcggtcccctcctccgccccgtcgtcctgactctctctccctcctttcctcagaggatgtccggcttccagatcaacctcaacccgctcaaggagccactcggcttcatcaaggtcctcgagtggattgcttctatctttgcttttgccacctgtggaggttttaagggccaaacagaaattcaagtgaattgtcctcctgcagttactgagaataaaactgttacagctacttttggttatccattcaggttgaatgaggcatcatttcagccacctccaggtgtaaacatatgtgatgtaaattggaaagattacgtcctcataggcgattactcttcttctgcacaattctatgttacctttgcagtctttgtgttcctgtactgcattgctgcccttctgctttatgttggctacacgagtctgtatctggatagtcgtaaacttcctatgatagactttgttgttacacttgttgccacttttttgtggttggtgagcacttcagcctgggctaaagctctgacagatattaaaatagctactggtcacaatattattgatgaacttccgccttgtaagaagaaagcagtactgtgttactttggctctgtgaccagtatgggatccctaaatgtatctgtgatatttggctttctaaatatgatactctggggaggaaatgcttggtttgtgtacaaggagaccagcctacacagtccatcaaatacatctgcccctcatagccaaggaggtattccacctcctaccggaatataattaaagggagaaatacactgtatgaagtatatgttgatactatgacatgttgccaacaccttgagaagcattatttgtttctaataaaagtaatggctttgtcaatatattggtgggtttaaaactttgctgcttttttacataaagcctgtgcctttcctagaaagttaagatgtaaatgtattctcacatgtaaatttgaaagttcaggggtctattatgaaatgatacacatttttaaatgaaccataatttttttcactaagctgtttgccttccaaagtgtttacaccttaagccttaacatgtatcttcattcagaaaacagttatattgtcataccatagtaggaagaaaaacctttatttggaatatacactactgtaagtttgtacagatcatatacctaccacctgtctttgcttaaagagccttgattacataaatatgtaggaaaaaacatattgagttcaaaatttatatctaacattgtttatgttatgatttttttttaattgcaaagactaggtgtatatttttttctgtttttctaaatgacccgtggtacttaataggtgtactaaaattgtgttgggagcagggatttggaaatttctgagagatgtgtagttaatttagtaattctgtttcatgagatatgatctgttatgctagtggtttaataggcttgctatgtaagtagaacgtggctcaactagatatctttatatgtatgggcattactcttagtgatatttgtttcctgtcctttgttgctcatgctgtttaagtgcaggctgagacccagcctctttgtaagtacagtaaaataatccaccgttttttacagaccctagtcaaagggttaaaaaaattaagattgctttccatgtttgaaatttaccattgagagtcaatgaagttgctattttgagtttagcattgatattgtgaaaataagtgcaatttggatttcatgtttcttaatattcattcttgtttcacaaatgaatgattaaggaattatgcatcataaaggaacctaagtgaggtatatgatgagtgtattgtctttgcacacacatataggtatattctgaatacaagcttattcacattttgcttcctaatctttttgttgtacagggattcaggtttcttattcttacaacatgattgtttatatgtgaagcacatcttgctgttgccttatttttgatgcttttattcatgacaagaattgtcaatataagaatgtatatcttttttgcaaccaatttaataaaggagttgaaagaaagagtgcactgattgttaatattacaaagaaaccttcatcttaaaggcattgagcagtgcaaaacagaactgattttcaaagcaggaaatagaatcacagttttaatgtttggcaaggaataaaacagacagaaatgctttggagactatggttctatccttttttcttccgacctcatttagaaaatacttatttgcaactcttagattgttttcctgatataccttttctcattaattgtctaattaactagcaaagattcctgcttaagagtgtgtgctctgcaaccaaactgcctagatttgaatcttgtctacaccacttactagctgtttaact

SEQ ID NO: 1203 - DNA, 2183 bp, Homo sapiens
gagcgcacgcgtacacgcgtgcgcaggggaagaccgagtgccaggggctgaaccgcagggaagggggcgcggcgcacgcagtatggcgcccaacatctacttggttcgccagcggatcagtcgactcggccagaggatgtccggcttccagatcaacctcaacccgctcaaggagccactcggcttcatcaaggtcctcgagtggattgcttctatctttgcttttgccacctgtggaggttttaagggccaaacagaaattcaagtgaattgtcctcctgcagttactgagaataaaactgttacagctacttttggttatccattcaggttgaatgaggcatcatttcagccacctccaggtgtaaacatatgtgatgtaaattggaaagattacgtcctcataggcgattactcttcttctgcacaattctatgttacctttgcagtctttgtgttcctgtactgcattgctgcccttctgctttatgttggctacacgagtctgtatctggatagtcgtaaacttcctatgatagactttgttgttacacttgttgccacttttttgtggttggtgagcacttcagcctgggctaaagctctgacagatattaaaatagctactggtcacaatattattgatgaacttccgccttgtaagaagaaagcagtactgtgttactttggctctgtgaccagtatgggatccctaaatgtatctgtgatatttggctttctaaatatgatactctggggaggaaatgcttggtttgtgtacaaggagaccagcctacacagtccatcaaatacatctgcccctcatagccaaggaggtattccacctcctaccggaatataattaaagggagaaatacactgtatgaagtatatgttgatactatgacatgttgccaacaccttgagaagcattatttgtttctaataaaagtaatggctttgtcaatatattggtgggtttaaaactttgctgcttttttacataaagcctgtgcctttcctagaaagttaagatgtaaatgtattctcacatgtaaatttgaaagttcaggggtctattatgaaatgatacacatttttaaatgaaccataatttttttcactaagctgtttgccttccaaagtgtttacaccttaagccttaacatgtatcttcattcagaaaacagttatattgtcataccatagtaggaagaaaaacctttatttggaatatacactactgtaagtttgtacagatcatatacctaccacctgtctttgcttaaagagccttgattacataaatatgtaggaaaaaacatattgagttcaaaatttatatctaacattgtttatgttatgatttttttttaattgcaaagactaggtgtatatttttttctgtttttctaaatgacccgtggtacttaataggtgtactaaaattgtgttgggagcagggatttggaaatttctgagagatgtgtagttaatttagtaattctgtttcatgagatatgatctgttatgctagtggtttaataggcttgctatgtaagtagaacgtggctcaactagatatctttatatgtatgggcattactcttagtgatatttgtttcctgtcctttgttgctcatgctgtttaagtgcaggctgagacccagcctctttgtaagtacagtaaaataatccaccgttttttacagaccctagtcaaagggttaaaaaaattaagattgctttccatgtttgaaatttaccattgagagtcaatgaagttgctattttgagtttagcattgatattgtgaaaataagtgcaatttggatttcatgtttcttaatattcattcttgtttcacaaatgaatgattaaggaattatgcatcataaaggaacctaagtgaggtatatgatgagtgtattgtctttgcacacacatataggtatattctgaatacaagcttattcacattttgcttcctaatctttttgttgtacagggattcaggtttcttattcttacaacatgattgtttatatgtgaagcacatcttgctgttgccttatttttgatgcttttattcatgacaagaattgtcaatataagaatgtatatcttttttgcaaccaatttaataaaggagttgaaagaaaaaaaaaaaaaaaaaaaaaaaa

SEQ ID NO: 1204 - DNA, 2539 bp, Homo sapiens
ggatcagcccaaaggtaggctcaggctccgacggtggcccgcgggggtcacgaggcttcgtagtggaggaacgggtttggcgtgtgggacgcagctgcctctgtactggggagtcacggagtggccgggctccagggacatggcggcggcctctgcggtgtcggtgctgctggtggcggcggagaggaaccggtggcatcgtctcccgagcctgctcctgccgccgaggacatgggtgtggaggcaaagaaccatgaagtacacaacagccacaggaagaaacattaccaaggtcctcattgcaaacagaggagaaattgcctgcagggtgatgcgcacagccaaaaaactgggtgtacagactgtggcggtttatagtgaggctgacagaaattccatgcatgtagatatggcagatgaagcatattccatcggccccgctccctcccagcagagctacctatctatggagaaaatcattcaagtggccaagacctctgctgcacaggctatccatccaggatgcggttttctttcagaaaacatggaatttgctgaactttgtaagcaagaaggaattatttttataggccctcctccatctgcaattagagacatgggtataaagagcacatccaaatccataatggctgctgctggagtacctgttgtggagggttatcatggtgaggaccaatcagaccagtgcctgaaggaacacgccaggagaattggctatcctgtcatgattaaagccgtccggggtggaggaggaaaaggaatgaggattgttagatcagaacaagaatttcaagaacagttagagtcagcacggagagaagctaagaagtctttcaatgatgatgctatgctgatcgagaagtttgtagacacaccgaggcatgtagaagtccaggtgtttggtgatcaccatggcaatgctgtgtacttgtttgaaagagactgtagtgtgcagaggcgacatcagaagatcattgaggaggccccagcgcctggtattaaatctgaagtaagaaaaaagctgggagaagctgcagtcagagctgctaaagctgtaaattatgttggagcagggactgtggagtttattatggactcaaaacataatttctgtttcatggagatgaatacaaggctgcaagtggaacatcctgttactgagatgatcacaggaactgacttggtggagtggcagcttagaattgcagcaggagagaagattcctttgagccaggaagaaataactctgcagggccatgccttcgaagctagaatatatgcagaagatcctagcaataacttcatgcctgtggcaggcccattagtgcacctctctactcctcgagcagacccttccaccaggattgaaactggagtacggcaaggagacgaagtttccgtgcattatgaccccatgattgcgaagctggtcgtgtgggcagcagatcgccaggcggcattgacaaaactgaggtacagccttcgtcagtacaatattgttggactgcccaccaacattgacttcttactcaacctgtctggccacccagagtttgaagctgggaacgtgcacactgatttcatccctcaacaccacaaacagttgttgctcagtcggaaggctgcagccaaagagtctttatgccaggcagccctgggtctcatcctcaaggagaaagccatgaccgacactttcactcttcaggcacatgatcaattctctccattttcgtctagcagtggaagaagactgaatatctcgtataccagaaacatgactcttaaagatggtaaaaacaatgtagccatagctgtaacgtataaccatgatgggtcttatagcatgcagattgaagataaaactttccaagtccttggtaatctttacagcgagggagactgcacttacctgaaatgttctgttaatggagttgctagtaaagcgaagctgattatcctggaaaacactatttacctattttccaaggaaggaagtattgagattgacattccagtccccaaatacttatcttctgtgagctcacaagaaactcagggcggccccttagctcctatgactggaaccattgaaaaggtgtttgtcaaagctggagacaaagtgaaagcgggagattccctcatggttatgatcgccatgaagatggagcataccataaagtctccaaaggatggcacagtaaagaaagtgttctacagagaaggtgctcaggccaacagacacactcctttagtcgagtttgaggaggaagaatcagacaaaagggaatcggaataaactccagcaaggaaatggccagttaagtagtgtcttctctctccaccaaaaagaggaagtgcctccagcttttctgggggtctcataaagagcagttttactaaatgattgtatgcttatgctgaacacctttcatattggagaatcatgcatttgggtcactaattatctcaaaatatttcatactaataaagttgaattattttttattggaagccaatg

SEQ ID NO: 1205 - DNA, 2519 bp, Homo sapiens
aggctcaggctccgacggtggccggcgggggtcacgaggcttcgtagtggaggaacgggtttggcgtgtgggacgcagctgcctctgtactggggagtcacggagtggccgggctccagggacatggcggcggcctctgcggtgtcggtgctgctggtggcggcggagaggaaccggtggcatcgtctcccgagcctgctcctgccgccgaggacatgggtgtggaggcaaagaaccatgaagtacacaacagccacaggaagaaacattaccaaggtcctcattgcaaacagaggagaaattgcctgcagggtgatgcgcacagccaaaaaactgggtgtacagactgtggcggtttatagtgaggctgacagaaattccatgcatgtagatatggcagatgaagcatattccatcggccccgctccctcccagcagagctacctatctatggagaaaatcattcaagtggccaagacctctgctgcacaggctatccatccaggatgcggttttctttcagaaaacatggaatttgctgaactttgtaagcaagaaggaattatttttataggccctcctccatctgcaattagagacatgggtataaagagcacatccaaatccataatggctgctgctggagtacctgttgtggagggttatcatggtgaggaccaatcagaccagtgcctgaaggaacacgccaggagaattggctatcctgtcatgattaaagccgtccggggtggaggaggaaaaggaatgaggattgttagatcagaacaagaatttcaagaacagttagagtcagcacggagagaagctaagaagtctttcaatgatgatgctatgctgatcgagaagtttgtagacacaccgaggcatgtagaagtccaggtgtttggtgatcaccatggcaatgctgtgtacttgtttgaaagagactgtagtgtgcagaggcgacatcagaagatcattgaggaggccccagcgcctggtattaaatctgaagtaagaaaaaagctgggagaagctgcagtcagagctgctaaagctgtaaattatgttggagcagggactgtggagtttattatggactcaaaacataatttctgtttcatggagatgaatacaaggctgcaagtggaacatcctgttactgagatgatcacaggaactgacttggtggagtggcagcttagaattgcagcaggagagaagattcctttgagccaggaagaaataactctgcagggccatgccttcgaagctagaatatatgcagaagatcctagcaataacttcatgcctgtggcaggcccattagtgcacctctctactcctcgagcagacccttccaccaggattgaaactggagtacggcaaggagacgaagtttccgtgcattatgaccccatgattgcgaagctggtcgtgtgggcagcagatcgccaggcggcattgacaaaactgaggtacagccttcgtcagtacaatattgttggactgcccaccaacattgacttcttactcaacctgtctggccacccagagtttgaagctgggaacgtgcacactgatttcatccctcaacaccacaaacagttgttgctcagtcggaaggctgcagccaaagagtctttatgccaggcagccctgggtctcatcctcaaggagaaagccatgaccgacactttcactcttcaggcacatgatcaattctctccattttcgtctagcagtggaagaagactgaatatctcgtataccagaaacatgactcttaaagatggtaaaaacaatgtagccatagctgtaacgtataaccatgatgggtcttatagcatgcagattgaagataaaactttccaagtccttggtaatctttacagcgagggagactgcacttacctgaaatgttctgttaatggagttgctagtaaagcgaagctgattatcctggaaaacactatttacctattttccaaggaaggaagtattgagattgacattccagtccccaaatacttatcttctgtgagctcacaagaaactcagggcggccccttagctcctatgactggaaccattgaaaaggtgtttgtcaaagctggagacaaagtgaaagcgggagattccctcatggttatgatcgccatgaagatggagcataccataaagtctccaaaggatggcacagtaaagaaagtgttctacagagaaggtgctcaggccaacagacacactcctttagtcgagtttgaggaggaagaatcagacaaaagggaatcggaataaactccagcaaggaaatggccagttaagtagtgtcttctctctccaccaaaaagaggaagtgcctccagcttttctgggggtctcataaagagcagttttactaaatgattgtatgcttatgctgaacacctttcatattggagaatcatgcatttgggtcactaattatctcaaaatatttcatactaataaagttgaattattttttattggaagcc

SEQ ID NO: 1206 - DNA, 3208 bp, Homo sapiens
cccgtgattcattcacagcggcagacgagcgccaggaaagggttatttgatctgatccctcaagttccggaggcagcagtatcaagataaagaggaagttgtcttatggatgaatactgttgggccctaccataatcgtcaagaaacatataagtacttttcacttccattctgtgtggggtcaaaaaaaagtatcagtcattaccatgaaactctgggagaagcacttcaaggggttgaattggaatttagtggtctggatattaaatttaaagatgatgtgatgccagccacttactgtgaaattgatttagataaagaaaagagagatgcatttgtatatgccataaaaaatcattactggtaccagatgtacatagatgatttaccaatatggggtattgttggtgaggctgatgaaaatggagaagattactatctttggacctataaaaaacttgaaataggttttaatggaaatcgaattgttgatgttaatctaactagtgaaggaaaggtgaaactggttccaaatactaaaatccagatgtcatattcagtaaaatggaaaaagtcagatgtgaaatttgaagatcgatttgacaaatatcttgatccgtccttttttcaacatcggattcattggttttcaattttcaactccttcatgatggtgatcttcttggtgggcttagtttcaatgattttaatgagaacattaagaaaagattatgctcggtacagtaaagaggaagaaatggatgatatggatagagacctaggagatgaatatggatggaaacaggtgcatggagatgtatttagaccatcaagtcacccactgatattttcctctctgattggttctggatgtcagatatttgctgtgtctctcatcgttattattgttgcaatgatagaagatttatatactgagaggggatcaatgctcagtacagccatatttgtctatgctgctacgtctccagtgaatggttattttggaggaagtctgtatgctagacaaggaggaaggagatggataaagcagatgtttattggggcattccttatcccagctatggtgtgtggcactgccttcttcatcaatttcatagccatttattaccatgcttcaagagccattccttttggaacaatggtggccgtttgttgcatctgtttttttgttattcttcctctaaatcttgttggtacaatacttggccgaaatctgtcaggtcagcccaactttccttgtcgtgtcaatgctgtgcctcgtcctataccggagaaaaaatggttcatggagcctgcggttattgtttgcctgggtggaattttaccttttggttcaatctttattgaaatgtatttcatcttcacgtctttctgggcatataagatctattatgtctatggcttcatgatgctggtgctggttatcctgtgcattgtgactgtctgtgtgactattgtgtgcacatattttctactaaatgcagaagattaccggtggcaatggacaagttttctctctgctgcatcaactgcaatctatgtttacatgtattccttttactactattttttcaaaacaaagatgtatggcttatttcaaacatcattttactttggatatatggcggtatttagcacagccttggggataatgtgtggagcgattggttacatgggaacaagtgcctttgtccgaaaaatctatactaatgtgaaaattgactagagacccaagaaaacctggaactttggatcaatttctttttcataggggtggaacttgcacagcaaaaacaaacaaacgcaagaagagatttgggctttaacacactgggtactttgtgggtctctctttcgtcggtggcttaaagtaacatctatttccattgatcctaggttcttcctgactgctttctccaactgttcacagcaaatgcttggattttatgcagtaggcattactacagtacatggctaatcttcccaaaaactagctcattaaagatgaaatagaccagctctcttcagtgaagaggacaaatagtttatttaaagcatttgttccaataaaataaatagagggaaacttggatgctaaaattacttttttcctcttatttttactgccattgtcgacctattgtgggacatttttatatattgaatctgggttcttttttgactttttttttttcccaatccaacagcatccttttttttaaaagagagaattagaaaatattaaatcctgcatgtaatatatctgctgtcatcttagttggaccaacttcccatttatttatcttaaaactatacagttacatcttaattccatccaaagaagatacagtttgaagacagaagtgtactctctacaatgcaatttactgtacagttagaaagcaaagtgttaaatggagaagatacttgtttttattaaacattttgagatttagataaactacattttaactgaatgtctaaagtgattatcttttttccccccaagttagtcttaaatcttttgggtttgaatgaaggttttacataagaaattattaaaaacaaggggggtgggtaataaatgtatataacattaaataatgtaacgtaggtgtagattcccaaatgcatttggatgtacagatcgactacagagtacttttttcttatgatgattggtgtagaaatgtgtgatttgggtgggcttttacatcttgcctaccattgcatgaaacattggggtttcttcaaaatgtgtgtgtcatacttcttttgggaggggggttgttttcttctgtttattttctgagactcctacaggagccaaatttgtaatttagagacacttaattttgttaatcctgtctgggacacttaagtaacatctaaagcattattgctttagaatgttcaaataaaatttcctgaccaaattgttttgtggaaatagatgtgtttgcaatttgaagatatctttctgtccagaaggcaaaattaccgaatgccatttttaaaagtatgctataaactatgctactctcatacaggggacccgtattttaaaatctccagacttgcttacatctagattatccagcacaatcataaagtgaatgacaaaccctttgaatgaaattgtggcacaaaatctgttcaggttggtgtaccgtgtaaagtggggatg

SEQ ID NO: 1207 - DNA, 6130 bp, Homo sapiens
gaggcgcggggggcgggggaggctcaggagcgggcggtgacggcgacggcggcggcagaggaggcagcggctgggccgggccccgtgcgtctgtccgcgccccgtggatgcgaatcggccgcggcggaggcggcggcggcggaggaggcggcggcgggaggaggagtcggtgagccggctccgggccggaggggcgcggaggatgaggccgctgcctggcgctcttggcgtggcggcggccgccgcgctgtggctgctgctgctgctgctgccccggacccgggcggacgagcacgaacacacgtatcaagataaagaggaagttgtcttatggatgaatactgttgggccctaccataatcgtcaagaaacatataagtacttttcacttccattctgtgtggggtcaaaaaaaagtatcagtcattaccatgaaactctgggagaagcacttcaaggggttgaattggaatttagtggtctggatattaaatttaaagatgatgtgatgccagccacttactgtgaaattgatttagataaagaaaagagagatgcatttgtatatgccataaaaaatcattactggtaccagatgtacatagatgatttaccaatatggggtattgttggtgaggctgatgaaaatggagaagattactatctttggacctataaaaaacttgaaataggttttaatggaaatcgaattgttgatgttaatctaactagtgaaggaaaggtgaaactggttccaaatactaaaatccagatgtcatattcagtaaaatggaaaaagtcagatgtgaaatttgaagatcgatttgacaaatatcttgatccgtccttttttcaacatcggattcattggttttcaattttcaactccttcatgatggtgatcttcttggtgggcttagtttcaatgattttaatgagaacattaagaaaagattatgctcggtacagtaaagaggaagaaatggatgatatggatagagacctaggagatgaatatggatggaaacaggtgcatggagatgtatttagaccatcaagtcacccactgatattttcctctctgattggttctggatgtcagatatttgctgtgtctctcatcgttattattgttgcaatgatagaagatttatatactgagaggggatcaatgctcagtacagccatatttgtctatgctgctacgtctccagtgaatggttattttggaggaagtctgtatgctagacaaggaggaaggagatggataaagcagatgtttattggggcattccttatcccagctatggtgtgtggcactgccttcttcatcaatttcatagccatttattaccatgcttcaagagccattccttttggaacaatggtggccgtttgttgcatctgtttttttgttattcttcctctaaatcttgttggtacaatacttggccgaaatctgtcaggtcagcccaactttccttgtcgtgtcaatgctgtgcctcgtcctataccggagaaaaaatggttcatggagcctgcggttattgtttgcctgggtggaattttaccttttggttcaatctttattgaaatgtatttcatcttcacgtctttctgggcatataagatctattatgtctatggcttcatgatgctggtgctggttatcctgtgcattgtgactgtctgtgtgactattgtgtgcacatattttctactaaatgcagaagattaccggtggcaatggacaagttttctctctgctgcatcaactgcaatctatgtttacatgtattccttttactactattttttcaaaacaaagatgtatggcttatttcaaacatcattttactttggatatatggcggtatttagcacagccttggggataatgtgtggagcgattggttacatgggaacaagtgcctttgtccgaaaaatctatactaatgtgaaaattgactagagacccaagaaaacctggaactttggatcaatttctttttcataggggtggaacttgcacagcaaaaacaaacaaacgcaagaagagatttgggctttaacacactgggtactttgtgggtctctctttcgtcggtggcttaaagtaacatctatttccattgatcctaggttcttcctgactgctttctccaactgttcacagcaaatgcttggattttatgcagtaggcattactacagtacatggctaatcttcccaaaaactagctcattaaagatgaaatagaccagctctcttcagtgaagaggacaaatagtttatttaaagcatttgttccaataaaataaatagagggaaacttggatgctaaaattacatgaataggaatcttcctggcacttagtgtttctatgttattgaaaaatgatgttccagaaagattacttttttcctcttatttttactgccattgtcgacctattgtgggacatttttatatattgaatctgggttcttttttgactttttttttttcccaatccaacagcatccttttttttaaaagagagaattagaaaatattaaatcctgcatgtaatatatctgctgtcatcttagttggaccaacttcccatttatttatcttaaaactatacagttacatcttaattccatccaaagaagatacagtttgaagacagaagtgtactctctacaatgcaatttactgtacagttagaaagcaaagtgttaaatggagaagatacttgtttttattaaacattttgagatttagataaactacattttaactgaatgtctaaagtgattatcttttttccccccaagttagtcttaaatcttttgggtttgaatgaaggttttacataagaaattattaaaaacaaggggggtgggtaataaatgtatataacattaaataatgtaacgtaggtgtagattcccaaatgcatttggatgtacagatcgactacagagtacttttttcttatgatgattggtgtagaaatgtgtgatttgggtgggcttttacatcttgcctaccattgcatgaaacattggggtttcttcaaaatgtgtgtgtcatacttcttttgggaggggggttgttttcttctgtttattttctgagactcctacaggagccaaatttgtaatttagagacacttaattttgttaatcctgtctgggacacttaagtaacatctaaagcattattgctttagaatgttcaaataaaatttcctgaccaaattgttttgtggaaatagatgtgtttgcaatttgaagatatctttctgtccagaaggcaaaattaccgaatgccatttttaaaagtatgctataaactatgctactctcatacaggggacccgtattttaaaatctccagacttgcttacatctagattatccagcacaatcataaagtgaatgacaaaccctttgaatgaaattgtggcacaaaatctgttcaggttggtgtaccgtgtaaagtggggatggggtaaaagtggttaacgtactgttggatcaacaaataaaggttacagttttgtaagagaagtgatttgaatacatttttctggaactattcataatatgaagttttcctagaaccactgagtttctagtttaatagtttgctatgcaaatgaccacctaaaacaatactttatattgttatttttagaaagactcaaaacacctgtatttaaaccttaatatgaaaatcatgcaattaatagttacacaagatgttttcattacaaaatatgtacctatatattgatggactctacatcctatattgtgacatgtaagtcctttaaaaggtgaaaagtatgatttcttaccacttaagtatgattgatatgatccaacaaatttgatcagaagctgtaggtaaatcctcttctgaagccaaaatggtatattaaatataatttattggtacttccattttctcttccttcttacttgcctttaagatcttataaaaaagaaactaaaagttaatatttagttgcctatattatgtaaccttttaactatatataaagtacttttttggtttctttctcaccacttttattcaaaagtacttttaacataccaatacatagtctgtctgatgggagtataaattggacagtaaggttttgtcttaataaaatgaaatttgtttctcatgatatgaatcttgcaggtaagatgtagggtttattgaaaatgtgtgggttaaatgctttcaggtacaccaattctttctactaaattgagctctatttgaagttctttggaatctgtggtgaaaaataattttctgatttccaaatacattaagagcattaaatgaatattaatcacctttaaagtcttttagaaaaggacttgtattggtttttggctgcatagaggggttgaataagtgtatgtatgtgtgtgcgtgtgtgtgtgtcttcttaaagaagatgtaattcacaaatagtttagctccctagcgctcagttgtagaatagaaaatagaacattattcaagttaattgaaaggtgaggtttttatacccccactaatgctgtgtatctgtctttcgtttgttaacattatttgcttaatttctttcaactcacactttggataatactatcaaaaactaaggctaaacattccttgtgtatctttaagcatgcttctcctgaaatttaactacattagtagttgacatttgtatacatatatcctaatacaagagtaggataaggtggaaatgtaatggcctgagggatggtgaagcattctttcagtatttttcatcatgttgggctcctagattgtactggggttgcccataaatcaaaccccatactcttagaattcattatattatggtgatatccgaacctagtgaatggtatgcttgggtgttttccattgagagtggatggacctctttataaagttggttgctgcaaaatccagttcttccaaaagccactttatttagggtttattcacaagtcatatccattttggtacagtgtttgtttcctaatatttattaaccaccttataccaaatgtcttgcaaagaaatgttattaaaaccttgaatttttacaaatgtaaaaaacaaaaagtgtattaatgtatttgttcaggaaaagctacataccgaagggcttttgtatatgaattctgtggtggggagacccatttgtaatctatatggcagttccatctgggttttaagtttagatttcaccgtgtcttagtgcttcattctattggtttattggaacatgtaataaataggagtagtgatgtattaaaacacaagtattcattaatgttttatatcttcactaaaattctatagttatgaaactattttatcaatcaaggtgttatatttcagtcagaagtgaaaatttatgaagagtatttggaagtgtgtacagaaataaactagacttacaggtaggctagatcagaacgttaacatatgaacctgcagaaatctggtaagacttaaattcagtgtgaggaataactctagttctctcctatgagcatttcctaaaagccatctgatttggcattcttactggagctgcagacagaaatctacaaagacaaaagtaaacaaaattaagttattattccactgttaggaatggaaataaacttgtgaagtctgtttattttgaagtattggtgaactaggcttgctaattgataactgcagcagtttgtgtttactccagttcatcagcttaggtcatttgaaagatataagagcttaaggcaagaaagaaataacatggaattctatttgaaggacaacagaacattcttggaaaagcagctccagttggtttttcagctgtcaaacttgaatgtgtaagtccccacagagcatggacagtcggtgcagagttccaaggaaacaattattgcctgatgaccacttccattttgtatacactctttggttcgtataggccatattccaactggctttttagtaatagaaatccagtatataatgtatcaaatacaattgaggttctaacctagtgtgttaatttatctgaatttggatttttaaaaagtaataaaaagttaaatgta

SEQ ID NO: 1208 - DNA, 3433 bp, Homo sapiens
gaggcgcggggggcgggggaggctcaggagcgggcggtgacggcgacggcggcggcagaggaggcagcggctgggccgggccccgtgcgtctgtccgcgccccgtggatgcgaatcggccgcggcggaggcggcggcggcggaggaggcggcggcgggaggaggagtcggtgagccggctccgggccggaggggcgcggaggatgaggccgctgcctggcgctcttggcgtggcggcggccgccgcgctgtggctgctgctgctgctgctgccccggacccgggcggacgagcacgaacacacgtatcaagataaagaggaagttgtcttatggatgaatactgttgggccctaccataatcgtcaagaaacatataagtacttttcacttccattctgtgtggggtcaaaaaaaagtatcagtcattaccatgaaactctgggagaagcacttcaaggggttgaattggaatttagtggtctggatattaaatttaaagatgatgtgatgccagccacttactgtgaaattgatttagataaagaaaagagagatgcatttgtatatgccataaaaaatcattactggtaccagatgtacatagatgatttaccaatatggggtattgttggtgaggctgatgaaaatggagaagattactatctttggacctataaaaaacttgaaataggttttaatggaaatcgaattgttgatgttaatctaactagtgaaggaaaggtgaaactggttccaaatactaaaatccagatgtcatattcagtaaaatggaaaaagtcagatgtgaaatttgaagatcgatttgacaaatatcttgatccgtccttttttcaacatcggattcattggttttcaattttcaactccttcatgatggtgatcttcttggtgggcttagtttcaatgattttaatgagaacattaagaaaagattatgctcggtacagtaaagaggaagaaatggatgatatggatagagacctaggagatgaatatggatggaaacaggtgcatggagatgtatttagaccatcaagtcacccactgatattttcctctctgattggttctggatgtcagatatttgctgtgtctctcatcgttattattgttgcaatgatagaagatttatatactgagaggggatcaatgctcagtacagccatatttgtctatgctgctacgtctccagtgaatggttattttggaggaagtctgtatgctagacaaggaggaaggagatggataaagcagatgtttattggggcattccttatcccagctatggtgtgtggcactgccttcttcatcaatttcatagccatttattaccatgcttcaagagccattccttttggaacaatggtggccgtttgttgcatctgtttttttgttattcttcctctaaatcttgttggtacaatacttggccgaaatctgtcaggtcagcccaactttccttgtcgtgtcaatgctgtgcctcgtcctataccggagaaaaaatggttcatggagcctgcggttattgtttgcctgggtggaattttaccttttggttcaatctttattgaaatgtatttcatcttcacgtctttctgggcatataagatctattatgtctatggcttcatgatgctggtgctggttatcctgtgcattgtgactgtctgtgtgactattgtgtgcacatattttctactaaatgcagaagattaccggtggcaatggacaagttttctctctgctgcatcaactgcaatctatgtttacatgtattccttttactactattttttcaaaacaaagatgtatggcttatttcaaacatcattttactttggatatatggcggtatttagcacagccttggggataatgtgtggagcgattggttacatgggaacaagtgcctttgtccgaaaaatctatactaatgtgaaaattgactagagacccaagaaaacctggaactttggatcaatttctttttcataggggtggaacttgcacagcaaaaacaaacaaacgcaagaagagatttgggctttaacacactgggtactttgtgggtctctctttcgtcggtggcttaaagtaacatctatttccattgatcctaggttcttcctgactgctttctccaactgttcacagcaaatgcttggattttatgcagtaggcattactacagtacatggctaatcttcccaaaaactagctcattaaagatgaaatagaccagctctcttcagtgaagaggacaaatagtttatttaaagcatttgttccaataaaataaatagagggaaacttggatgctaaaattacttttttcctcttatttttactgccattgtcgacctattgtgggacatttttatatattgaatctgggttcttttttgactttttttttttcccaatccaacagcatccttttttttaaaagagagaattagaaaatattaaatcctgcatgtaatatatctgctgtcatcttagttggaccaacttcccatttatttatcttaaaactatacagttacatcttaattccatccaaagaagatacagtttgaagacagaagtgtactctctacaatgcaatttactgtacagttagaaagcaaagtgttaaatggagaagatacttgtttttattaaacattttgagatttagataaactacattttaactgaatgtctaaagtgattatcttttttccccccaagttagtcttaaatcttttgggtttgaatgaaggttttacataagaaattattaaaaacaaggggggtgggtaataaatgtatataacattaaataatgtaacgtaggtgtagattcccaaatgcatttggatgtacagatcgactacagagtacttttttcttatgatgattggtgtagaaatgtgtgatttgggtgggcttttacatcttgcctaccattgcatgaaacattggggtttcttcaaaatgtgtgtgtcatacttcttttgggaggggggttgttttcttctgtttattttctgagactcctacaggagccaaatttgtaatttagagacacttaattttgttaatcctgtctgggacacttaagtaacatctaaagcattattgctttagaatgttcaaataaaatttcctgaccaaattgttttgtggaaatagatgtgtttgcaatttgaagatatctttctgtccagaaggcaaaattaccgaatgccatttttaaaagtatgctataaactatgctactctcatacaggggacccgtattttaaaatctccagacttgcttacatctagattatccagcacaatcataaagtgaatgacaaaccctttgaatgaaattgtggcacaaaatctgttcaggttggtgtaccgtgtaaagtggggatg

SEQ ID NO: 1209 - DNA, 1721 bp, Homo sapiens
ggtaagctcgcgccgccgcgtcagctcagcgctgggtctctcggtcccgcagccgtgaggaggacggtctgcatactcgctgcccgccggctccctcccccgcgtccctgcgaccgccgcggcgaagatggcctcaggagtgcaagtagctgatgaagtatgtcgcattttttatgacatgaaagttcgtaaatgctccacaccagaagaaatcaagaaaagaaagaaggctgtcattttttgtctcagtgcagacaaaaagtgcatcattgtagaagaaggcaaagagatcttggttggagatgttggtgtaaccataactgatcctttcaagcattttgtgggaatgcttcctgaaaaagattgtcgctatgctttgtatgatgcaagctttgaaacaaaagaatccagaaaagaagagttgatgttttttttgtgggcaccagaactagcacctctgaaaagtaaaatgatctatgcaagctccaaggatgcaattaaaaagaaatttcaaggcataaaacatgaatgtcaagcaaatggaccagaagatctcaatcgggcttgtattgctgaaaagttaggtggatccttaattgtagcctttgaaggatgccctgtgtagattattcagtgccacaaattgaaagcttccatgtttaatgttatcctcttgctatataaataaagcaaatatatttaggccagggtctcactgagggggagctgtcttgtcatcttttagagtaaactattctataaacatatgcaaacagccctaaataaatctaaagtctaaagttttattgatgtgaaattaaattcttattggccaaatgcctgttttgatgagttgatttataaagatttttgttaagctcaggattttaaattacacagttcacaaacagtaaaggccatgtgaagagaattattacatctttattaacctcagcatttactttgtttcttttgcttaggaaattgctcataatctggttataattttggtccaaattctttattcttccttgagctaagcagaataatggaatataatatgtcttcataatataacaacactaatacactaatagtaagattaagttaggcagtcttctaccaaatgtgtaatggagattgcctcaaaattgtgtccacataatccacgctcatcttgcaaagcgctatttcaggcacatcattggaatacaggaagtagccctgcacctgccagtgagctcgccattcactgattggaagagtgacctggcatcttggaaatcattgtgtgtcttcaggagaatgtgcagtgtcttgtaacaactaattataatgcaaattagggctacattgtaatctgctttgttaatgaaaatgataaaacagaatattgacaagctaggacacctgtggtatctttaattgtatctccttcagaagtttgcttcttatggtataataaagtatggaagaatattgagtatatgtttactctgggcctgggagaacttaactttctagagcagtttgttgacttgtgtgcaatggggagaggtaccatgatgacactcacagggagccactgttcactgacacttggaagcggtcattgttaatatcacgggcgtaacactttgaacgatatagagatgcacaaacagttgaacttagaagtagcagtattggctttatgtaataaaggaagcatttttgactta

SEQ ID NO: 1210 - DNA, 859 bp, Homo sapiens
gcgttccgtcctgaggcgcgcccgccccggggtaagctcgcgccgccgcgtcagctcagcgctgggtctctcggtcccgcagccgtgaggaggacggtctgcatactcgctgcccgccggctccctcccccgcgtccctgcgaccgccgcggcgaagatggcctcaggagtgcaagtagctgatgaagtatgtcgcattttttatgacatgaaagttcgtaaatgctccacaccagaagaaatcaagaaaagaaagaaggctgtcattttttgtctcagtgcagacaaaaagtgcatcattgtagaagaaggcaaagagatcttggttggagatgttggtgtaaccataactgatcctttcaagcattttgtgggaatgcttcctgaaaaagattgtcgctatgctttgtatgatgcaagctttgaaacaaaagaatccagaaaagaagagttgatgttttttttgtgggcaccagaactagcacctctgaaaagtaaaatgatctatgcaagctccaaggatgcaattaaaaagaaatttcaaggcataaaacatgaatgtcaagcaaatggaccagaagatctcaatcgggcttgtattgctgaaaagttaggtggatccttaattgtagcctttgaaggatgccctgtgtagattattcagtgccacaaattgaaagcttccatgtttaatgttatcctcttgctatataaataaagcaaatatatttaggccagggtctcactgagggggagctgtcttgtcatcttttagagtaaactattctataaacatatgcaaacagccctaaataaatctaaagtctaaagttttaaaaaaaaaaaaaaaaaaaaaaaa

SEQ ID NO: 1211 - DNA, 1422 bp, Homo sapiens
cggtctgcatactcgctgcccgccggctccctcccccgcgtccctgcgaccgccgcggcgaacataggcctcaggagtgcaagtagctgatgaagtatgtcgcattttttatgacatgaaagttcgtaaatgctccacaccagaagaaatcaagaaaagaaagaaggctgtcattttttgtctcagtgcagacaaaaagtgcatcattgtagaagaaggcaaagagatcttggttggagatgttggtgtaaccataactgatcctttcaagcattttgtgggaatgcttcctgaaaaagattgtcgctatgctttgtatgatgcaagctttgaaacaaaagaatccagaaaagaagagttgatgttttttttgtgggcaccagaactagcacctctgaaaagtaaaatgatctatgcaagctccaaggatgcaattaaaaagaaatttcaaggcataaaacatgaatgtcaagcaaatggaccagaagatctcaatcgggcttgtattgctgaaaagttaggtggatccttaattgtagcctttgaaggatgccctgtgtagattattcagtgccacaaattgaaagcttccatgtttaatgttatcctcttgctatataaataaagcaaatatatttaggccagggtctcactgagggggagctgtcttgtcatcttttagagtaaactattctataaacatatgcaaacagccctaaataaatctaaagtctaaagttttattgatgtgaaattaaattcttattggccaaatgcctgttttgatgagttgatttataaagatttttgttaagctcaggattttaaattacacagttcacaaacagtaaaggccatgtgaagagaattattacatctttattaacctcagcatttactttgtttcttttgcttaggaaattgctcataatctggttataattttggtccaaattctttattcttccttgagctaagcagaataatggaatataatatgtcttcataatataacaacactaatacactaatagtaagattaagttaggcagtcttctaccaaatgtgtaatggagattgcctcaaaattgtgtccacataatccacgctcatcttgcaaagcgctatttcaggcacatcattggaatacaggaagtagccctgcacctgccagtgagctcgccattcactgattggaagagtgacctggcatcttggaaatcattgtgtgtcttcaggagaatgtgcagtgtcttgtaacaactaattataatgcaaattaggccactgttcactgacacttggaagcggtcattgttaatatcacgggcgtaacactttgaacgatatagagatgcacaaacagttgaacttagaagtagcagtattggctttatgtaataaaggaagcatttttgactt

SEQ ID NO: 1212 - DNA, 2542 bp, Homo sapiens
gcatgcgcgctcgcgctcccgccctctagctgcgctcggctgagtcagtcagtctgtcggagtctgtcctcggagcaggcggagtaaagggacttgagcgagccagttgccggattattctatttcccctccctctctcccgccccgtatctcttttcacccttctcccaccctcgctcgcgtagccatggcggagccgtcggcggccactcagtcccattccatctcctcgtcgtccttcggagccgagccgtccgcgcccggcggcggcgggagcccaggagcctgccccgccctggggacgaagagctgcagctcctcctgtgcggtgcacgatctgattttctggagagatgtgaagaagactgggtttgtctttggcaccacgctgatcatgctgctttccctggcagctttcagtgtcatcagtgtggtttcttacctcatcctggctcttctctctgtcaccatcagcttcaggatctacaagtccgtcatccaagctgtacagaagtcagaagaaggccatccattcaaagcctacctggacgtagacattactctgtcctcagaagctttccataattacatgaatgctgccatggtgcacatcaacagggccctgaaactcattattcgtctctttctggtagaagatctggttgactccttgaagctggctgtcttcatgtggctgatgacctatgttggtgctgtttttaacggaatcacccttctaattcttgctgaactgctcattttcagtgtcccgattgtctatgagaagtacaaggatccaagcaaaactccctggaatcgccaaaaaaaaggcagaataagtacatggaaaccagaaatgcaacagttactaaaacaccatttaatagttataacgtcgttacttgtactatgaaggaaaatactcagtgtcagcttgagcctgcattccaagctttttttttaatttggtgttttctcccatcctttccctttaaccctcagtatcaagcacaaaaattgatggactgataaaagaactatcttagaactcagaagaagaaagaatcaaattcataggataagtcaataccttaatggtggtagagcctttacctgtagcttgaaaggggaaagattggaggtaagagagaaaatgaaagaacacctctgggtccttctgtccagttttcagcactagtcttactcagctatccattatagttttgcccttaagaagtcatgattaacttatgaaaaaattatttggggacaggagtgtgataccttccttggtttttttttgcagccctcaaatcctatcttcctgccccacaatgtgagcagctacccctgatactccttttctttaatgatttaactatcaacttgataaataacttataggtgatagtgataattcctgattccaagaatgccatctgataaaaaagaatagaaatggaaagtgggactgagagggagtcagcaggcatgctgcggtggcggtcactccctctgccactatccccagggaaggaaaggctccgccatttgggaaagtggtttctacgtcactggacaccggttctgagcattagtttgagaactcgttcccgaatgtgctttcctccctctcccctgcccacctcaagtttaataaataaggttgtacttttcttactataaaataaatgtctgtaactgctgtgcactgctgtaaacttgttagagaaaaaaataacctgcatgtgggctcctcagttattgagtttttgtgatcctatctcagtctgggggggaacattctcaagaggtgaaatacagaaagcctttttttcttgatcttttcccgagattcaaatctccgattcccatttgggggcaagtttttttcttcaccttcaatatgagaattcagcgaacttgaaagaaaaatcatctgtgagttccttcaggttctcactcatagtcatgatccttcagagggaatatgcactggcgagtttaaagtaagggctatgatatttgatggtcccaaagtacggcagctgcaaaaagtagtggaaggaaattgtctacgtgtcttggaaaaattagttaggaatttggatgggtaaaaggtacccttgccttactccatcttattttcttagccccctttgagtgttttaactggtttcatgtcctagtaggaagtgcattctccatcctcatcctctgccctcccaggaagtcagtgattgtctttttgggcttcccctccaaaggaccttctgcagtggaagtgccacatccagttcttttcttttgttgctgctgtgtttagataattgaagagatctttgtgccacacaggatttttttttttttttaagaaaaacctatagatgaaaaattactaatgaaactgtgtgtacgtgtctgtgcgtgcaacataaaaatacagtagcacctaaggagcttgaatcttggttcctgtaaaatttcaaattgatgtggtattaataaaaaaaaaaaaaacacaaacaaaaaaaaaaaaaaa

SEQ ID NO: 1213 - DNA, 2456 bp, Homo sapiens
tgcgcatgcgcgctcgcgctcccgccctctagctgcgctcggctgagtcagtcagtctgtcggagtctgtcctcggagcaggcggagtaaagggacttgagcgagccagttgccggattattctatttcccctccctctctcccgccccgtatctcttttcacccttctcccaccctcgctcgcgtagccatggcggagccgtcggcggccactcagtcccattccatctcctcgtcgtccttcggagccgagccgtccgcgcccggcggcggcgggagcccaggagcctgccccgccctggggacgaagagctgcagctcctcctgtgcggtgcacgatctgattttctggagagatgtgaagaagactgggtttgtctttggcaccacgctgatcatgctgctttccctggcagctttcagtgtcatcagtgtggtttcttacctcatcctggctcttctctctgtcaccatcagcttcaggatctacaagtccgtcatccaagctgtacagaagtcagaagaaggccatccattcaaagcctacctggacgtagacattactctgtcctcagaagctttccataattacatgaatgctgccatggtgcacatcaacagggccctgaaactcattattcgtctctttctggtagaagatctggttgactccttgaagctggctgtcttcatgtggctgatgacctatgttggtgctgtttttaacggaatcacccttctaattcttgctgaactgctcattttcagtgtcccgattgtctatgagaagtacaagacccagattgatcactatgttggcatcgcccgagatcagaccaagtcaattgttgaaaagatccaagcaaaactccctggaatcgccaaaaaaaaggcagaataagtacatggaaaccagaaatgcaacagttactaaaacaccatttaatagttataacgtcgttacttgtactatgaaggaaaatactcagtgtcagcttgagcctgcattccaagctttttttttaatttggtgttttctcccatcctttccctttaaccctcagtatcaagcacaaaaattgatggactgataaaagaactatcttagaactcagaagaagaaagaatcaaattcataggataagtcaataccttaatggtggtagagcctttacctgtagcttgaaaggggaaagattggaggtaagagagaaaatgaaagaacacctctgggtccttctgtccagttttcagcactagtcttactcagctatccattatagttttgcccttaagaagtcatgattaacttatgaaaaaatatcctatcttcctgccccacaatgtgagcagctacccctgatactccttttctttaatgatttaactatcaacttgataaataacttataggtgatagtgataattcctgattccaagaatgccatctgataaaaaagaatagaaatggaaagtgggactgagagggagtcagcaggcatgctgcggtggcggtcactccctctgccactatccccagggaaggaaaggctccgccatttgggaaagtggtttctacgtcactggacaccggttctgagcattagtttgagaactcgttcccgaatgtgctttcctccctctcccctgcccacctcaagtttaataaataaggttgtacttttcttactataaaataaatgtctgtaactgctgtgcactgctgtaaacttgttagagaaaaaaataacctgcatgtgggctcctcagttattgagtttttgtgatcctatctcagtctgggggggaacattctcaagaggtgaaatacagaaagcctttttttcttgatcttttcccgagattcaaatctccgattcccatttgggggcaagtttttttcttcaccttcaatatgagaattcagcgaacttgaaagaaaaatcatctgtgagttccttcaggttctcactcatagtcatgatccttcagagggaatatgcactggcgagtttaaagtaagggctatgatatttgatggtcccaaagtacggcagctgcaaaaagtagtggaaggaaattgtctacgtgtcttggaaaaattagttaggaatttggatgggtaaaaggtacccttgccttactccatcttattttcttagccccctttgagtgttttaactggtttcatgtcctagtaggaagtgcattctccatcctcatcctctgccctcccaggaagtcagtgattgtctttttgggcttcccctccaaaggaccttctgcagtggaagtgccacatccagttcttttcttttttttaagaaaaacctatagatgaaaaattactaatgaaactgtgtgtacgtgtctgtgcgtgcaacataaaaatacagtagcacctaaggagcttgaatcttggttcctgtaaaatttcaaattgatgtggtattaat

SEQ ID NO: 1214 - DNA, 2560 bp, Homo sapiens
gttgcagccctctagctgcactcggctgagtcagtctgtcggagtctgtcctcagagcaggcagagtaaagggacttgaacgagccagttgccagattattctatttcccctccctctctcccgccccctatctcttttcacccttctcccaccctcgctcacgtagccatggcggagccatcggcggccactcagtccccttccatctcctcgtcgtcctccggagccgagacgtccgcatccggcggcagcggaagcccaggagcctgccctgccctggggacgaagagctgcagctcctcctgtgcggttcacgatctgcttttctggagagatgtaaagaagactgggtttgtctttgccaccacgctgatcatgctgctttccctggcagctttcagtgtcatcagtgtggtttcttacctcatcctggctcttctctctgtcaccatcagcttcaggatctacaagtccgtcatccaagctgtacagaagtcagaagaaggccatccaatcaaagcctacctggacgtagacattactctgtcctcggaagctttccataattacatgaatgctgccgtggtgcacatcaacagggccctgaaactcattattcttctctttctagtagaagatctggttgactccttgaagcaggctgtcttcatgtggctgatgacctatgttggtgctttttttaacggaatcacccttctaattcttgctgaactgctcattttcagtgtcccgattgtctatgagaagtacaagacccagattgatcactatgttggcatcgcccgacatcagaccaagtcaattgttgaaaagatccaagcaaaactccctggaatcgccaaaaaaaaaggcagaataagtacatggaaccagaaatccaacagttactaaaacaccatttaatagttataacgtcgttgcttgtactgtgaacgaacatactcagtgtcagcttgagcctgcattccaagctttttttttaatttggtgttttctcccatcctttccctttaaccctcagtatcaagcacaaaaactgatggactgataaaagaactatcttagaactcagaagaagaaagaatcaaattcataggataagtcaacaccttaatggtggtagagcctttacctgtagcttgaaaggggaaagattggaggtaaaagagaaaatgaaagatagaacacctctgggtccttctatccagttttcagcactagtcttactcagctatccattatagttttgcccttaagaagtaatgattaacttatgaaaaaattatttggggacaggagtgtgatgccttccttgtttttgtttttttttttgcagccctcaaatcctatcttcctgccccacaatgtgagcagctactcctgatactccttttctttaatgatttaactttcaacttgatgaataacttataagtgatagtgataattcctgattccaagaatgccatctgataagaaagaatagaaatggaaagtgggactgagagggagtcagcaggaatgctgcagtggccgtcactccctctgccactatccccagggaaggaaaggctccgccatttgggcaagtggtttctacatcactggacaccagttctgagcgttagtttgagaactcgttcccgaatgtgctttcctccctctcccctgcccgcctcaagtttaataaatatggttgtacttttcttattataaaataaatgtctgtaactgctgtgcactgctgtaaacttgttagagaaaaaataacctgcatgtgggctcctcagttattgagttattgtgatcctatctcagtctgggggggaacattctcaagaggtgaaatacagaaagcctttttttcttgatcttttcccagttattcaaatgtccgattcccatttgggggcaagtttttttcttcaccttcaatatgaaaattcagcgaaattgaaagaaaaatcatctgtgagttccttcaggttctcactcatagtcatgatccttcagagggaatatgcactggcgagtttaaagtaagggctatgatatttgatggtcccaaagtacggcagctgcaaaaagtagtggaaggaaattgtctttctacgtgttttgggaaaattaattaggaatttggatgggtaaaaggtacccttgccttacttcatcttattttcttagccccctttgagtgttttaactggtttcatgtcctagtaggaagtgcattctccatcctcatcctctgccctcccaggaagtcagtgattgtctttttgggcttcccctccaaaggaccttctgcagtggaagagcctcatccagttattttcttttgttgctgctgtgtttagataattgaagagatctttgtgccacacaggatttttttttttaagaaaaacctgcagatgaaaaattactaatgaaactgtgtgtacgtgtctgtgcatgcaacataaaaatacagtagcacctaaggagcttgaatcttggttcctgtaaaattgcaaattgatgtggtattaataa

SEQ ID NO: 1215 - DNA, 2583 bp, Homo sapiens
gcatgcgcgctcgcgctcccgccctctagctgcgctcggctgagtcagtcagtctgtcggagtctgtcctcggagcaggcggagtaaagggacttgagcgagccagttgccggattattctatttcccctccctctctcccgccccgtatctcttttcacccttctcccaccctcgctcgcgtagccatggcggagccgtcggcggccactcagtcccattccatctcctcgtcgtccttcggagccgagccgtccgcgcccggcggcggcgggagcccaggagcctgccccgccctggggacgaagagctgcagctcctcctgtgcggtgcacgatctgattttctggagagatgtgaagaagactgggtttgtctttggcaccacgctgatcatgctgctttccctggcagctttcagtgtcatcagtgtggtttcttacctcatcctggctcttctctctgtcaccatcagcttcaggatctacaagtccgtcatccaagctgtacagaagtcagaagaaggccatccattcaaagcctacctggacgtagacattactctgtcctcagaagctttccataattacatgaatgctgccatggtgcacatcaacagggccctgaaactcattattcgtctctttctggtagaagatctggttgactccttgaagctggctgtcttcatgtggctgatgacctatgttggtgctgtttttaacggaatcacccttctaattcttgctgaactgctcattttcagtgtcccgattgtctatgagaagtacaagacccagattgatcactatgttggcatcgcccgagatcagaccaagtcaattgttgaaaagatccaagcaaaactccctggaatcgccaaaaaaaaggcagaataagtacatggaaaccagaaatgcaacagttactaaaacaccatttaatagttataacgtcgttacttgtactatgaaggaaaatactcagtgtcagcttgagcctgcattccaagctttttttttaatttggtgttttctcccatcctttccctttaaccctcagtatcaagcacaaaaattgatggactgataaaagaactatcttagaactcagaagaagaaagaatcaaattcataggataagtcaataccttaatggtggtagagcctttacctgtagcttgaaaggggaaagattggaggtaagagagaaaatgaaagaacacctctgggtccttctgtccagttttcagcactagtcttactcagctatccattatagttttgcccttaagaagtcatgattaacttatgaaaaaattatttggggacaggagtgtgataccttccttggtttttttttgcagccctcaaatcctatcttcctgccccacaatgtgagcagctacccctgatactccttttctttaatgatttaactatcaacttgataaataacttataggtgatagtgataattcctgattccaagaatgccatctgataaaaaagaatagaaatggaaagtgggactgagagggagtcagcaggcatgctgcggtggcggtcactccctctgccactatccccagggaaggaaaggctccgccatttgggaaagtggtttctacgtcactggacaccggttctgagcattagtttgagaactcgttcccgaatgtgctttcctccctctcccctgcccacctcaagtttaataaataaggttgtacttttcttactataaaataaatgtctgtaactgctgtgcactgctgtaaacttgttagagaaaaaaataacctgcatgtgggctcctcagttattgagtttttgtgatcctatctcagtctgggggggaacattctcaagaggtgaaatacagaaagcctttttttcttgatcttttcccgagattcaaatctccgattcccatttgggggcaagtttttttcttcaccttcaatatgagaattcagcgaacttgaaagaaaaatcatctgtgagttccttcaggttctcactcatagtcatgatccttcagagggaatatgcactggcgagtttaaagtaagggctatgatatttgatggtcccaaagtacggcagctgcaaaaagtagtggaaggaaattgtctacgtgtcttggaaaaattagttaggaatttggatgggtaaaaggtacccttgccttactccatcttattttcttagccccctttgagtgttttaactggtttcatgtcctagtaggaagtgcattctccatcctcatcctctgccctcccaggaagtcagtgattgtctttttgggcttcccctccaaaggaccttctgcagtggaagtgccacatccagttcttttcttttgttgctgctgtgtttagataattgaagagatctttgtgccacacaggatttttttttttttttaagaaaaacctatagatgaaaaattactaatgaaactgtgtgtacgtgtctgtgcgtgcaacataaaaatacagtagcacctaaggagcttgaatcttggttcctgtaaaatttcaaattgatgtggtattaataaaaaaaaaaaaaaaaca

SEQ ID NO: 1216 - DNA, 2590 bp, Homo sapiens
tgcgcatgcgcgctcgcgctcccgccctctagctgcgctcggctgagtcagtcagtctgtcggagtctgtcctcggagcaggcggagtaaagggacttgagcgagccagttgccggattattctatttcccctccctctctcccgccccgtatctcttttcacccttctcccaccctcgctcgcgtagccatggcggagccgtcggcggccactcagtcccattccatctcctcgtcgtccttcggagccgagccgtccgcgcccggcggcggcgggagcccaggagcctgccccgccctggggacgaagagctgcagctcctcctgtgcggtgcacgatctgattttctggagagatgtgaagaagactgggtttgtctttggcaccacgctgatcatgctgctttccctggcagctttcagtgtcatcagtgtggtttcttacctcatcctggctcttctctctgtcaccatcagcttcaggatctacaagtccgtcatccaagctgtacagaagtcagaagaaggccatccattcaaagcctacctggacgtagacattactctgtcctcagaagctttccataattacatgaatgctgccatggtgcacatcaacagggccctgaaactcattattcgtctctttctggtagaagatctggttgactccttgaagctggctgtcttcatgtggctgatgacctatgttggtgctgtttttaacggaatcacccttctaattcttgctgaactgctcattttcagtgtcccgattgtctatgagaagtacaagacccagattgatcactatgttggcatcgcccgagatcagaccaagtcaattgttgaaaagatccaagcaaaactccctggaatcgccaaaaaaaaggcagaataagtacatggaaaccagaaatgcaacagttactaaaacaccatttaatagttataacgtcgttacttgtactatgaaggaaaatactcagtgtcagcttgagcctgcattccaagctttttttttaatttggtgttttctcccatcctttccctttaaccctcagtatcaagcacaaaaattgatggactgataaaagaactatcttagaactcagaagaagaaagaatcaaattcataggataagtcaataccttaatggtggtagagcctttacctgtagcttgaaaggggaaagattggaggtaagagagaaaatgaaagaacacctctgggtccttctgtccagttttcagcactagtcttactcagctatccattatagttttgcccttaagaagtcatgattaacttatgaaaaaattatttggggacaggagtgtgataccttccttggtttttttttgcagccctcaaatcctatcttcctgccccacaatgtgagcagctacccctgatactccttttctttaatgatttaactatcaacttgataaataacttataggtgatagtgataattcctgattccaagaatgccatctgataaaaaagaatagaaatggaaagtgggactgagagggagtcagcaggcatgctgcggtggcggtcactccctctgccactatccccagggaaggaaaggctccgccatttgggaaagtggtttctacgtcactggacaccggttctgagcattagtttgagaactcgttcccgaatgtgctttcctccctctcccctgcccacctcaagtttaataaataaggttgtacttttcttactataaaataaatgtctgtaactgctgtgcactgctgtaaacttgttagagaaaaaaataacctgcatgtgggctcctcagttattgagtttttgtgatcctatctcagtctgggggggaacattctcaagaggtgaaatacagaaagcctttttttcttgatcttttcccgagattcaaatctccgattcccatttgggggcaagtttttttcttcaccttcaatatgagaattcagcgaacttgaaagaaaaatcatctgtgagttccttcaggttctcactcatagtcatgatccttcagagggaatatgcactggcgagtttaaagtaagggctatgatatttgatggtcccaaagtacggcagctgcaaaaagtagtggaaggaaattgtctacgtgtcttggaaaaattagttaggaatttggatgggtaaaaggtacccttgccttactccatcttattttcttagccccctttgagtgttttaactggtttcatgtcctagtaggaagtgcattctccatcctcatcctctgccctcccaggaagtcagtgattgtctttttgggcttcccctccaaaggaccttctgcagtggaagtgccacatccagttcttttcttttgttgctgctgtgtttagataattgaagagatctttgtgccacacaggattttttttttttttaagaaaaacctatagatgaaaaattactaatgaaactgtgtgtacgtgtctgtgcgtgcaacataaaaatacagtagcacctaaggagcttgaatcttggttcctgtaaaatttcaaattgatgtggtattaataaaaaaaaaaaaaacacaaacaa

SEQ ID NO: 1217 - DNA, 2597 bp, Homo sapiens
ccctctagctgcactcggctgagtcagtctgtcggagtctgtcctcagagcaggcagagtaaagggacttgaacgagccagttgccagattattctatttcccctccctctctcccgccccctatctcttttcacccttctcccaccctcgctcacgtagccatggcggagccatcggcggccactcagtccccttccatctcctcgtcgtcctccggagccgagacgtccgcatccggcggcagcggaagcccaggagcctgccctgccctggggacgaagagctgcagctcctcctgtgcggttcacgatctgcttttctggagagatgtaaagaagactgggtttgtctttgccaccacgctgatcatgctgctttccctggcagctttcagtgtcatcagtgtggtttcttacctcatcctggctcttctctctgtcaccatcagcttcaggatctacaagtccgtcatccaagctgtacagaagtcagaagaaggccatccaatcaaagcctacctggacgtagacattactctgtcctcggaagctttccataattacatgaatgctgccgtggtgcacatcaacagggccctgaaactcattattcttctctttctagtagaagatctggttgactccttgaagcaggctgtcttcatgtggctgatgacctatgttggtgctttttttaacggaatcacccttctaattcttgctgaactgctcattttcagtgtcccgattgtctatgagaagtacaagacccagattgatcactatgttggcatcgcccgacatcagaccaagtcaattgttgaaaagatccaagcaaaactccctggaatcgccaaaaaaaaggcagaataagtacatggaaccagaaatgcaacagttactaaaacaccatttaatagttataacgtcgttgcttgtactgtgaacgaacatactcagtgtcagcttgagcctgcattccaagctttttttttaatttggtgttttctcccatcctttccctttaaccctcagtatcaagcacaaaaactgatggactgataaaagaactatcttagaactcagaagaagaaagaatcaaattcataggataagtcaacaccttaatggtggtagagcctttacctgtagcttgaaaggggaaagattggaggtaaaagagaaaatgaaagatagaacacctctgggtccttctatccagttttcagcactagtcttactcagctatccattatagttttgcccttaagaagtaatgattaacttatgaaaaaattatttggggacaggagtgtgatgccttccttgtttttgtttttttttttgcagccctcaaatcctatcttcctgccccacaatgtgagcagctactcctgatactccttttctttaatgatttaactttcaacttgatgaataacttataagtgatagtgataattcctgattccaagaatgccatctgataagaaagaatagaaatggaaagtgggactgagagggagtcagcaggaatgctgcagtggccgtcactccctctgccactatccccagggaaggaaaggctccgccatttgggcaagtggtttctacatcactggacaccagttctgagcgttagtttgagaactcgttcccgaatgtgctttcctccctctcccctgcccgcctcaagtttaataaatatggttgtacttttcttattataaaataaatgtctgtaactgctgtgcactgctgtaaacttgttagagaaaaaataacctgcatgtgggctcctcagttattgagttattgtgatcctatctcagtctgggggggaacattctcaagaggtgaaatacagaaagcctttttttcttgatcttttcccagttgttcttttcttgatcttttcccgagattcaaatgtccgattcccatttgggggcaagtttttttcttcaccttcaatatgaaaattcagcgaaattgaaagaaaaatcatctgtgagttccttcaggttctcactcatagtcatgatccttcagagggaatatgcactggcgagtttaaagtaagggctatgatatttgatggtcccaaagtacggcagctgcaaaaagtagtggaaggaaattgtctttctacgtgttttgggaaaattaattaggaatttggatgggtaaaaggtacccttgccttacttcatcttattttcttagccccctttgagtgttttaactggtttcatgtcctagtaggaagtgcattctccatcctcatcctctgccctcccaggaagtcagtgattgtctttttgggcttcccctccaaaggaccttctgcagtggaagagcctcatccagttattttcttttgttgctgctgtgtttagataattgaagagatctttgtgccacacaggatttttttttttaagaaaaacctgcagatgaaaaattactaatgaaactgtgtgtacgtgtctgtgcatgcaacataaaaatacagtagcacctaaggagcttgaatcttggttcctgtaaaattgcaaattgatgtggtattaataacacacacacacacacacaca

SEQ ID NO: 1218 - DNA, 5005 bp, Homo sapiens
atgcaggaattagagcagaaagaagaggcagcgggcgaggaggccaatgatggaggctcaggccacagcctaggccaggaaggccgtgagtctgcagcaggggccaaggcggactacatttcccgaagtgcaccgaggtgggcaggacccggaagtgagggtgtgagaggcctctctggaagttgtcccgggtgttcgccgctggagcccgggtcgagaggacgaggtgccgctgcctggagaatcctccgctgccgtcggctcccggagcccagccctttcctaacccaacccaacctagcccagtcccagccgccagcgcctgtccctgtcacggaccccagcgttaccatgcatcctgccgtcttcctatccttacccgacctcagatgctcccttctgctcctggtaacttgggtttttactcctgtaacaactgaaataacaagtcttgatacagagaatatagatgaaattttaaacaatgctgatgttgctttagtaaatttttatgctgactggtgtcgtttcagtcagatgttgcatccaatttttgaggaagcttccgatgtcattaaggaagaatttccaaatgaaaatcaagtagtgtttgccagagttgattgtgatcagcactctgacatagcccagagatacaggataagcaaatacccaaccctcaaattgtttcgtaatgggatgatgatgaagagagaatacaggggtcagcgatcagtgaaagcattggcagattacatcaggcaacaaaaaagtgaccccattcaagaaattcgggacttagcagaaatcaccactcttgatcgcagcaaaagaaatatcattggatattttgagcaaaaggactcggacaactatagagtttttgaacgagtagcgaatattttgcatgatgactgtgcctttctttctgcatttggggatgtttcaaaaccggaaagatatagtggcgacaacataatctacaaaccaccagggcattctgctccggatatggtgtacttgggagctatgacaaattttgatgtgacttacaattggattcaagataaatgtgttcctcttgtccgagaaataacatttgaaaatggagaggaattgacagaagaaggactgccttttctcatactctttcacatgaaagaagatacagaaagtttagaaatattccagaatgaagtagctcggcaattaataagtgaaaaaggtacaataaactttttacatgccgattgtgacaaatttagacatcctcttctgcacatacagaaaactccagcagattgtcctgtaatcgctattgacagctttaggcatatgtatgtgtttggagacttcaaagatgtattaattcctggaaaactcaagcaattcgtatttgacttacattctggaaaactgcacagagaattccatcatggacctgacccaactgatacagccccaggagagcaagcccaagatgtagcaagcagtccacctgagagctccttccagaaactagcacccagtgaatataggtatactctattgagggatcgagatgagctttaaaaacttgaaaaacagtttgtaagcctttcaacagcagcatcaacctacgtggtggaaatagtaaacctatattttcataattctatgtgtatttttattttgaataaacagaaagaaattttgggtttttaatttttttctccccgactcaaaatgcattgtcatttaatatagtagcctcttaaaaaaaaaaaacctgctaggatttaaaaataaaaatcagaggcctatctccactttaaatctgtcctgtaaaagttttataaatcaaatgaaaggtgacattgccagaaacttaccattaacttgcactactagggtagggaggacttagggatgtttcctgtgtcgtatgtgcttttctttctttcatatgatcaattctgttggtattttcagtatctcatttctcaaagctaaagagatatacattctggatacttgggaggggaataaattaaagttttcacactgtgtactgtgttttactgattggttggatattgcttatgaaaattccatagtggtatttttttggattcttaatgtgtaacttaaacatactttgaagtggaggagagtcataagacagaacatttggcaggaattgtccttatgaaacaagaaaaagaaaatgaaaagtattattaagcttctgtgtttgtctaaaaatgtggcatatggatggcatttaaaactttgaatgaattatacctaaatctgggacagggaggtgacagtggaacaggctaccaatcagaactagatgacttttaaggctcctcctattatgagacttcaatttccaaagagaagaactagcagagaaattgtatttcagtaattttaagctccttctgtcttgtagagtcttgttatagttgtataaatcaaaaacacagaataaggaacatatttaactttttttcattataaaatggttagaggaccctaccccctctagattccctgatttccccaggcctgcagcatacagtaagatgggtccctgtgccaggcctcaatactgccagggaataaaaccagagggagaggaccctcagtgtcatatcaggaagcccagtgccagaggacagacaggttcaaaactggcttttcctctgggcctgggttggtgctataggccaagggtcattttatacttgggtataaatcaatcccagtttgggaaaagattatttttaagcttaaaaggctgacatgtgccattatatgtagtatgtaatatatgtaacatcttccaattcttttaaaataaaattaatatttataatggatatttaatgattgttatttttaaaaaccagcttataattcctcgttatgcatgatttatccaaagtttccatagttttattcaaaataataaatgttaataaggtgataaggggtatatttaatgtattgtatcaaattgtgaataagaaagtaggatggagctttctagaggttgggccttagttctgttatcctcattgcttttaaccaataagttaaatgaagttagagttatggtcttcaggttagattatggaccagatctgtgagggtcagcatggaaattcacattcaacaaggtagcacacaggaccaagagcagcacatgcaatcaactggaataatatagtaatcctgtaactgggtttgaaaaaataatcaacaaaagatacaattcaagggttaggttgcagagagctggcttgagagtagttattatgaaaaaggcctcaaggagtacgtgttcagtatgctctaagatgataaagtggctgttaaaaagggagttgatttgaggaagtattacttagcattcatgcatattgggcttaggctctagccctgccactatcattgtcttctctggactgtgaagtcactgaggacaaggaaactaaatttaatgtctgtatcactagtgcctagaatttctggacacttagtagtcaccatcaggcgtttatttaatgaatgagaagcaaagtgaccttggttacttttttaccctgaggggctcagcactcattaggacttggtgcctaattttataaaaagtcactaagctcaagtgcttggatgaaaggacagcgtggataaaaaggtttttaaaacatggatgttaaggctgttttgcttggagaagacttgggactgggacagtctttagatattatttgaaatgctggcactgtctatctggatcccagggcttgaactaggatttgaggaagtcacagggaagcagatttcagtctgacatttattcagtgcaagttttttggtgctgtagtatatgatgaaagatgtaaagctgaataaagcattatttctgccctagagttgttcacagcctagtcaggcatatggatatgtaaacaatgactgtaacgtgttatagatgtaaagacaaaataaaggttaaagagggcataaaggagcactcaattgcagagatttgaggacattatttttattttgagctttaaaaagatgaataggtgttctcaggaggtagggatctggctgagagggaataatctgagcaaaggtatgaaacagcctaatgcattagagaaaaaagttcttttagtaaggcatttggggttggggaagctagaaaaagaaatgggagctggtcacacagggccttgtgtgccagactaaggggtttgtagtatatattgtaggcagaagagatccatcaacagattgcaagcaaggaagtatgttcactttaaagtttgagaaagaatagtgtggaagcacgtctcaaatttagacttgttccccctctgaaccgtgaatcagaccatttcaggtagaagtcttccccggtttatctgatctactcggggcctcaggcttctcagctgggaagagaggatgcaagaccagactgaagaacacggttgagtccccagaaccaaaagggggcctttctgcttcttagccagctacctcttcgagtttttcaaattgtgagggggaccataaaaggatggaaacttttagatgacattctacaaattatttttttctttaaattaaaagaacctagccaataagatagagaatgggcatctaaggcatctcagagctctctgatgaagccaggttgtcaaagatcatttgcaaaagaagggaaaactggcatgacaaaagctacagagaggagagtgaaatatagaagtgtttgaaatgttcaagctcacaataagcttaaatttatagaaaatgctaaggttgtcaagaaggcttttttttttttcttttttaaacctgagggcaaaaaggaatggataaagtagtgtaatggattgacaatcaggaagaacagaataactcagttttttttctcctacaaggagatatggctggaccaaaataaaatgacatgaaactgcaaaaatgaaaa

SEQ ID NO: 1219 - DNA, 2087 bp, Homo sapiens
aaagtgctgggattacaggcatgagccattgcgcatggcctatatacacactcttaaagagatgattcttacaaatccagttctaggatgatgagtaatgagcaaaaagctggaatgtttgagctcaaggacttggtttcaggagggggtacaaatattggaagagactcagtaaatgcagaaagtagaaaaagtaattagagagttaccagaagcttgctttttcttacagattcctcataagtcactgaataaatagttgtagcagatatccattctttttgcatggggccagagacccagaaaggctatcagagatttcagcttcctctgtatcaaggtgctttgggaagcaaagctgccctgtaggtgaaagcagtagaaatttggaagaaaactcattgttctagaactgtcatagaaatatctcagatatgaaagacttaaacaaaaaggatattgagggacggctttctgcaaagatgtggcctaagatatgtgcatatctgtactaggagttgctgttgtgcatcttgtttaactctcttagaagggacttcagcctatatgtggttgttattaattacattctcaggaacagaatattaattttctgttacagaaaacagtaaatcagaagaccacaatctacgaaattcaggatgatagaggaaaaatggatgtagtggggacaggacaatgtcacaatatcccctgtgaagaaggagataagctccaacttttctgctttcgacttagaaaaaagaaccagatgtcaaaactgatttcagaaatgcatagttttatccagataaagaaaaaaacaaacccgagaaacaatgaccccaagagcatgaagctaccccaggaacagagtcagcttccaaatccttcagaggccagcacaaccttccctgagagccatcttcggactcctcagatgccaccaacaactccatccagcagtttcttcaccaagaaaagtgaagacacaatctccaaaatgaatgacttcatgaggatgcagatactgaaggaagggagtcattttccaggaccgttcatgaccagcataggcccagctgagagccatccccacactcctcagatgcctccatcaacaccaagcagcagtttcttaaccacgttgaaaccaagactgaagactgaacctgaagaagtttccatagaagacagtgcccagagtgacctcaaagaagtgatggtgctgaacgcaacagaatcatttgtatatgagcccaaagagcagaagaaaatgtttcatgccacagtggcaactgagaatgaagtcttccgagtgaaggtttttaatattgacctaaaggagaagttcaccccaaagaagatcattgccatagcaaattatgtttgccgcaatgggttcctggaggtatatcctttcacacttgtggctgatgtgaatgctgaccgaaacatggagatcccaaaaggattgattagaagtgccagcgtaactcctaaaatcaatcagctttgctcacaaactaaaggaagttttgtgaatggggtgtttgaggtacataagaaaaatgtaaggggtgaattcacttattatgaaatacaagataatacagggaagatggaagtggtggtgcatggacgactgaccacaatcaactgtgaggaaggagataaactgaaactcacctgctttgaattggcaccgaaaagtgggaataccggggagttgagatctgtaattcatagtcacatcaaggtcatcaagaccaggaaaaacaagaaagacatactcaatcctgattcaagtatggaaacttcaccagactttttcttctaaaatctggatgtcattgacgataatgtttatggagataaggtctaagtgcctaaaaaaatgtacatatacctggttgaaatacaacactatacatacacaccaccatatatactagctgttaatcctatggaatggggtattgggagtgcttttttaatttttcatagtttttttttaataaaatggcatattttgcatctacaacttctataatttgaaaaaataaataaacattatcttttttgtg

SEQ ID NO: 1220 - DNA, 2070 bp, Homo sapiens
ctcatcaacatgcattcccagaaatgccatgaaaggaaagaccaagtcttgactgagaaacggaccgggcagatgagggactcccacatatacctgtttcctgctcttcccgaagacattttgccacaagcatataattcagcttctgaaaaatacggtcttcctcactgcagacaccatgccagcgttttaaatcaagttggctactcgtgctgtttagagtatgcagtttgcctgtggcaatattaaactcatctggaagaaagcacttaaacctatccagttcctcatcggtgatgttatccaggctggttagcaagagtatctccttatatttactctccatctcacgacttttcagcttataagggatccaaactatgtaagattataccaccaaaagtgattcaacattcaaaatgaagcaagatacttcattttcttagcgtttctggagattacaacatcctgcggttccgtttctgggaactttactgatttatctcccccctcacacaaataagcattgattcctgcatttctgaagatctcaagatctggactactgttgaaaaaatttccagtgaggctcacttatgtctgtaaagatgggaaaaaaatacaagaacattgttctactaaaaggattagaggtcatcaatgattatcattttagaatggttaagtccttactgagcaacgatttaaaacttaatttaaaaatgagagaagagtatgacaaaattcagattgctgacttgatggaagaaaagttccgaggtgatgctggtttgggcaaactaataaaaattttcgaagatataccaacgcttgaagacctggctgaaactcttaaaaaagaaaagttaaaagtaaaaggaccagccctatcaagaaagaggaagaaggaagtggatgctacttcacctgcaccctccacaagcagcactgtcaaaactgaaggagcagaggcaactcctggagctcagaaaagaaaaaaatcaaccaaagaaaaggctggacccaaagggagtaaggtgtccgaggaacagactcagcctccctctcctgcaggagccggcatgtccacagccatgggccgttccccatctcccaagacctcattgtcagctccacccaacagttcttcaactgagaacccgaaaacagtggccaaatgtcaggtaactcccagaagaaatgttctccaaaaacgcccagtgatagtgaaggtactgagtacaacaaagccatttgaatatgagaccccagaaatggagaaaaaaataatgtttcatgctacagtggctacacagacacagttcttccatgtgaaggttttaaacaccagcttgaaggagaaattcaccccaaagaagatcattgccatagcaaattatgtttgccgcaatgggttcctggaggtatatcctttcacacttgtggctgatgtgaatgctgaccgaaacatggagatcccaaaaggattgattagaagtgccagcgtaactcctaaaatcaatcagctttgctcacaaactaaaggaagttttgtgaatggggtgtttgaggtacataagaaaaatgtaaggggtgaattcacttattatgaaatacaagataatacagggaagatggaagtggtggtgcatggacgactgaccacaatcaactgtgaggaaggagataaactgaaactcacctgctttgaattggcaccgaaaagtgggaataccggggagttgagatctgtaattcatagtcacatcaaggtcatcaagaccaggaaaaacaagaaagacatactcaatcctgattcaagtatggaaacttcaccagactttttcttctaaaatctggatgtcattgacgataatgtttatggagataaggtctaagtgcctaaaaaaatgtacatatacctggttgaaatacaacactatacatacacaccaccatatatactagctgttaatcctatggaatggggtattgggagtgcttttttaatttttcatagtttttttttaataaaatggcatattttgcatctacaacttctataatttg

SEQ ID NO: 1221 - DNA, 4143 bp, Homo sapiens
gggcaatagcagaataggagcaagccagcactagtcagctaactaagtgactcaaccaaggccttttttccttgttatctttgcagatacttcattttcttagcgtttctggagattacaacatcctgcggttccgtttctgggaactttactgatttatctcccccctcacacaaataagcattgattcctgcatttctgaagatctcaagatctggactactgttgaaaaaatttccagtgaggctcacttatgtctgtaaagatgggaaaaaaatacaagaacattgttctactaaaaggattagaggtcatcaatgattatcattttagaatggttaagtccttactgagcaacgatttaaaacttaatttaaaaatgagagaagagtatgacaaaattcagattgctgacttgatggaagaaaagttccgaggtgatgctggtttgggcaaactaataaaaattttcgaagatataccaacgcttgaagacctggctgaaactcttaaaaaagaaaagttaaaagtaaaaggaccagccctatcaagaaagaggaagaaggaagtggatgctacttcacctgcaccctccacaagcagcactgtcaaaactgaaggagcagaggcaactcctggagctcagaaaagaaaaaaatcaaccaaagaaaaggctggacccaaagggagtaaggtgtccgaggaacagactcagcctccctctcctgcaggagccggcatgtccacagccatgggccgttccccatctcccaagacctcattgtcagctccacccaacagttcttcaactgagaacccgaaaacagtggccaaatgtcaggtaactcccagaagaaatgttctccaaaaacgcccagtgatagtgaaggtactgagtacaacaaagccatttgaatatgagaccccagaaatggagaaaaaaataatgtttcatgctacagtggctacacagacacagttcttccatgtgaaggttttaaacaccagcttgaaggagaaattcaatggaaagaaaatcatcatcatatcagattatttggaatatgatagtctcctagaggtcaatgaagaatctactgtatctgaagctggtcctaaccaaacgtttgaggttccaaataaaatcatcaacagagcaaaggaaactctgaagattgatattcttcacaaacaagcttcaggaaatattgtatatggggtatttatgctacataagaaaacagtaaatcagaagaccacaatctacgaaattcaggatgatagaggaaaaatggatgtagtggggacaggacaatgtcacaatatcccctgtgaagaaggagataagctccaacttttctgctttcgacttagaaaaaagaaccagatgtcaaaactgatttcagaaatgcatagttttatccagataaagaaaaaaacaaacccgagaaacaatgaccccaagagcatgaagctaccccaggaacagagtcagcttccaaatccttcagaggccagcacaaccttccctgagagccatcttcggactcctcagatgccaccaacaactccatccagcagtttcttcaccaagaaaagtgaagacacaatctccaaaatgaatgacttcatgaggatgcagatactgaaggaagggagtcattttccaggaccgttcatgaccagcataggcccagctgagagccatccccacactcctcagatgcctccatcaacaccaagcagcagtttcttaaccacgttgaaaccaagactgaagactgaacctgaagaagtttccatagaagacagtgcccagagtgacctcaaagaagtgatggtgctgaacgcaacagaatcatttgtatatgagcccaaagagcagaagaaaatgtttcatgccacagtggcaactgagaatgaagtcttccgagtgaaggtttttaatattgacctaaaggagaagttcaccccaaagaagatcattgccatagcaaattatgtttgccgcaatgggttcctggaggtatatcctttcacacttgtggctgatgtgaatgctgaccgaaacatggagatcccaaaaggattgattagaagtgccagcgtaactcctaaaatcaatcagctttgctcacaaactaaaggaagttttgtgaatggggtgtttgaggtacataaggtaagcccacaccattgttttataaaatttctcctgcaacctccaatttttaaagtcttaacttgtcaactggagtttggtcaacttactcaacacagaaaatcaaccccttcacccttcccccagcactagagataattgaatagagttcatttcaggatatggggtacgttatattgtaacattcctcttcttaaggtatcatcatgcaagttatttagacagtcactaggaaacttggcattttattagttttgatgatctattcagagccacccttgtccaggacagtgcagagtttatatcaacacacatatccttaggattttgtttctttgagttcttctccatctgtatcaatgacaacttaatttaattgtgaataaaagagttgctctcccaagcctgaatcctgattgtgacaaccagagtaagaaataaaatagactactctgctttagaatgcagctatgtctaacagttagctagaattctgatcatttggactccaaagtttcttgcctcttctcattcattaattcatcaggagactgtagagcaactaacttctgcattaaataataagagaaatacgaagcaaaaagactaaaaaagtcacgtagcttaactgctcaatttataaatggggcaataaaatgcaaaaaaaagaaaaaaagcttggtgaattcttaggcttacagtgtgcctttcagtctctacacatcatgtaaatattatgcttagctgatttaacttcttgtttgaagtactgtttcatactccattatacatgtcttctagggtggcttacttttaattgtgctgttttctctacactcagtttaaatgactgtacatatatatgtggttgtagagttaatgaataatgagctacaaaccagaacaatgtgactagatagataggatgatctagatttgagatctgggcagattgggaaagagtgactatatggagaagaaagaagtagttacatattgaaataacagtctacttaatgaggacgtgcaacattctttctcaaacttacaaagtgccataaaaagcctctattctctgctcttgggcaggtgtgaaagaaacctaccaaattaatcagatttttctgtatccaggctccttaaaaaatcccagctgtgctgatgtggaaacaggaagaattaggaaagtaatcaattttttttcctagaaaaaatccagcagacaaagaacttcaacaaaagaggctcaagggaggagttgaaaggcaggattcaaagaccaagtatcttaagctatttggtacctgttattcaggacctacagctctgtttactctatcaaagacaaaagtttccagaaacaccctgtatttctcatagatttgaaaattattgatccagtttcagaagataagtgttaattttcttttgcagaaaaatgtaaggggtgaattcacttattatgaaatacaagataatacagggaagatggaagtggtggtgcatggacgactgaccacaatcaactgtgaggaaggagataaactgaaactcacctgctttgaattggcaccgaaaagtgggaataccggggagttgagatctgtaattcatagtcacatcaaggtcatcaagaccaggaaaaacaagaaagacatactcaatcctgattcaagtatggaaacttcaccagactttttcttctaaaatctggatgtcattgacgataatgtttatggagataaggtctaagtgcctaaaaaaatgtacatatacctggttgaaatacaacactatacatacacaccaccatatatactagctgttaatcctatggaatggggtattgggagtgcttttttaatttttcatagtttttttttaataaaatggcatattttgcatctacaacttctataatttgaaaaaataaataaacattatcttttttgtgaaaggaa

SEQ ID NO: 1222 - DNA, 2877 bp, Homo sapiens
gggcaatagcagaataggagcaagccagcactagtcagctaactaagtgactcaaccaaggccttttttccttgttatctttgcagatacttcattttcttagcgtttctggagattacaacatcctgcggttccgtttctgggaactttactgatttatctcccccctcacacaaataagcattgattcctgcatttctgaagatctcaagatctggactactgttgaaaaaatttccagtgaggctcacttatgtctgtaaagatgggaaaaaaatacaagaacattgttctactaaaaggattagaggtcatcaatgattatcattttagaatggttaagtccttactgagcaacgatttaaaacttaatttaaaaatgagagaagagtatgacaaaattcagattgctgacttgatggaagaaaagttccgaggtgatgctggtttgggcaaactaataaaaattttcgaagatataccaacgcttgaagacctggctgaaactcttaaaaaagaaaagttaaaagtaaaaggaccagccctatcaagaaagaggaagaaggaagtggatgctacttcacctgcaccctccacaagcagcactgtcaaaactgaaggagcagaggcaactcctggagctcagaaaagaaaaaaatcaaccaaagaaaaggctggacccaaagggagtaaggtgtccgaggaacagactcagcctccctctcctgcaggagccggcatgtccacagccatgggccgttccccatctcccaagacctcattgtcagctccacccaacagttcttcaactgagaacccgaaaacagtggccaaatgtcaggtaactcccagaagaaatgttctccaaaaacgcccagtgatagtgaaggtactgagtacaacaaagccatttgaatatgagaccccagaaatggagaaaaaaataatgtttcatgctacagtggctacacagacacagttcttccatgtgaaggttttaaacaccagcttgaaggagaaattcaatggaaagaaaatcatcatcatatcagattatttggaatatgatagtctcctagaggtcaatgaagaatctactgtatctgaagctggtcctaaccaaacgtttgaggttccaaataaaatcatcaacagagcaaaggaaactctgaagattgatattcttcacaaacaagcttcaggaaatattgtatatggggtatttatgctacataagaaaacagtaaatcagaagaccacaatctacgaaattcaggatgatagaggaaaaatggatgtagtggggacaggacaatgtcacaatatcccctgtgaagaaggagataagctccaacttttctgctttcgacttagaaaaaagaaccagatgtcaaaactgatttcagaaatgcatagttttatccagataaagaaaaaaacaaacccgagaaacaatgaccccaagagcatgaagctaccccaggaacagagtcagcttccaaatccttcagaggccagcacaaccttccctgagagccatcttcggactcctcagatgccaccaacaactccatccagcagtttcttcaccaagaaaagtgaagacacaatctccaaaatgaatgacttcatgaggatgcagatactgaaggaagggagtcattttccaggaccgttcatgaccagcataggcccagctgagagccatccccacactcctcagatgcctccatcaacaccaagcagcagtttcttaaccacgaaaagtgaagacacaatctccaaaatgaatgacttcatgaggatgcagatactgaaggaagggagtcattttccaggaccgttcatgaccagcataggcccagctgagagccatccccacactcctcagatgcctccatcaacaccaagcagcagtttcttaaccacgttgaaaccaagactgaagactgaacctgaagaagtttccatagaagacagtgcccagagtgacctcaaagaagtgatggtgctgaacgcaacagaatcatttgtatatgagcccaaagagcagaagaaaatgtttcatgccacagtggcaactgagaatgaagtcttccgagtgaaggtttttaatattgacctaaaggagaagttcaccccaaagaagatcattgccatagcaaattatgtttgccgcaatgggttcctggaggtatatcctttcacacttgtggctgatgtgaatgctgaccgaaacatggagatcccaaaaggattgattagaagtgccagcgtaactcctaaaatcaatcagctttgctcacaaactaaaggaagttttgtgaatggggtgtttgaggtacataagaaaaatgtaaggggtgaattcacttattatgaaatacaagataatacagggaagatggaagtggtggtgcatggacgactgaccacaatcaactgtgaggaaggagataaactgaaactcacctgctttgaattggcaccgaaaagtgggaataccggggagttgagatctgtaattcatagtcacatcaaggtcatcaagaccaggaaaaacaagaaagacatactcaatcctgattcaagtatggaaacttcaccagactttttcttctaaaatctggatgtcattgacgataatgtttatggagataaggtctaagtgcctaaaaaaatgtacatatacctggttgaaatacaacactatacatacacaccaccatatatactagctgttaatcctatggaatggggtattgggagtgcttttttaatttttcatagtttttttttaataaaatggcatattttgcatctacaacttctataatttgaaaaaataaataaacattatcttttttgtgaaaggaa

SEQ ID NO: 1223 - DNA, 2701 bp, Homo sapiens
gttgagagtccactatccacgtttgtttatccaggaataatgcagaaaatctgagcattcgtgaatctaatcattgagatacttcattttcttagcgtttctggagattacaacatcctgcggttccgtttctgggaactttactgatttatctcccccctcacacaaataagcattgattcctgcatttctgaagatctcaagatctggactactgttgaaaaaatttccagtgaggctcacttatgtctgtaaagatgggaaaaaaatacaagaacattgttctactaaaaggattagaggtcatcaatgattatcattttagaatggttaagtccttactgagcaacgatttaaaacttaatttaaaaatgagagaagagtatgacaaaattcagattgctgacttgatggaagaaaagttccgaggtgatgctggtttgggcaaactaataaaaattttcgaagatataccaacgcttgaagacctggctgaaactcttaaaaaagaaaagttaaaagtaaaaggaccagccctatcaagaaagaggaagaaggaagtggatgctacttcacctgcaccctccacaagcagcactgtcaaaactgaaggagcagaggcaactcctggagctcagaaaagaaaaaaatcaaccaaagaaaaggctggacccaaagggagtaaggtgtccgaggaacagactcagcctccctctcctgcaggagccggcatgtccacagccatgggccgttccccatctcccaagacctcattgtcagctccacccaacagttcttcaactgagaacccgaaaacagtggccaaatgtcaggtaactcccagaagaaatgttctccaaaaacgcccagtgatagtgaaggtactgagtacaacaaagccatttgaatatgagaccccagaaatggagaaaaaaataatgtttcatgctacagtggctacacagacacagttcttccatgtgaaggttttaaacaccagcttgaaggagaaattcaatggaaagaaaatcatcatcatatcagattatttggaatatgatagtctcctagaggtcaatgaagaatctactgtatctgaagctggtcctaaccaaacgtttgaggttccaaataaaatcatcaacagagcaaaggaaactctgaagattgatattcttcacaaacaagcttcaggaaatattgtatatggggtatttatgctacataagaaaacagtaaatcagaagaccacaatctacgaaattcaggatgatagaggaaaaatggatgtagtggggacaggacaatgtcacaatatcccctgtgaagaaggagataagctccaacttttctgctttcgacttagaaaaaagaaccagatgtcaaaactgatttcagaaatgcatagttttatccagataaagaaaaaaacaaacccgagaaacaatgaccccaagagcatgaagctaccccaggaacagagtcagcttccaaatccttcagaggccagcacaaccttccctgagagccatcttcggactcctcagatgccaccaacaactccatccagcagtttcttcaccaagaaaagtgaagacacaatctccaaaatgaatgacttcatgaggatgcagatactgaaggaagggagtcattttccaggaccgttcatgaccagcataggcccagctgagagccatccccacactcctcagatgcctccatcaacaccaagcagcagtttcttaaccacgttgaaaccaagactgaagactgaacctgaagaagtttccatagaagacagtgcccagagtgacctcaaagaagtgatggtgctgaacgcaacagaatcatttgtatatgagcccaaagagcagaagaaaatgtttcatgccacagtggcaactgagaatgaagtcttccgagtgaaggtttttaatattgacctaaaggagaagttcaccccaaagaagatcattgccatagcaaattatgtttgccgcaatgggttcctggaggtatatcctttcacacttgtggctgatgtgaatgctgaccgaaacatggagatcccaaaaggattgattagaagtgccagcgtaactcctaaaatcaatcagctttgctcacaaactaaaggaagttttgtgaatggggtgtttgaggtacataagaaaaatgtaaggggtgaattcacttattatgaaatacaagataatacagggaagatggaagtggtggtgcatggacgactgaccacaatcaactgtgaggaaggagataaactgaaactcacctgctttgaattggcaccgaaaagtgggaataccggggagttgagatctgtaattcatagtcacatcaaggtcatcaagaccaggaaaaacaagaaagacatactcaatcctgattcaagtatggaaacttcaccagactttttcttctaaaatctggatgtcattgacgataatgtttatggagataaggtctaagtgcctaaaaaaatgtacatatacctggttgaaatacaacactatacatacacaccaccatatatactagctgttaatcctatggaatggggtattgggagtgcttttttaatttttcatagtttttttttaataaaatggcatattttgcatctacaacttctataatttgaaaaaataaataaacattatcttttttgtgaaaggaa

SEQ ID NO: 1224 - DNA, 2694 bp, Homo sapiens
aagactactcaggcgtgcactgcgaggtggagatctgacttctcttgttcccgcttaagactgcctcctgtatacttcattttcttagcgtttctggagattacaacatcctgcggttccgtttctgggaactttactgatttatctcccccctcacacaaataagcattgattcctgcatttctgaagatctcaagatctggactactgttgaaaaaatttccagtgaggctcacttatgtctgtaaagatgggaaaaaaatacaagaacattgttctactaaaaggattagaggtcatcaatgattatcattttagaatggttaagtccttactgagcaacgatttaaaacttaatttaaaaatgagagaagagtatgacaaaattcagattgctgacttgatggaagaaaagttccgaggtgatgctggtttgggcaaactaataaaaattttcgaagatataccaacgcttgaagacctggctgaaactcttaaaaaagaaaagttaaaagtaaaaggaccagccctatcaagaaagaggaagaaggaagtggatgctacttcacctgcaccctccacaagcagcactgtcaaaactgaaggagcagaggcaactcctggagctcagaaaagaaaaaaatcaaccaaagaaaaggctggacccaaagggagtaaggtgtccgaggaacagactcagcctccctctcctgcaggagccggcatgtccacagccatgggccgttccccatctcccaagacctcattgtcagctccacccaacagttcttcaactgagaacccgaaaacagtggccaaatgtcaggtaactcccagaagaaatgttctccaaaaacgcccagtgatagtgaaggtactgagtacaacaaagccatttgaatatgagaccccagaaatggagaaaaaaataatgtttcatgctacagtggctacacagacacagttcttccatgtgaaggttttaaacaccagcttgaaggagaaattcaatggaaagaaaatcatcatcatatcagattatttggaatatgatagtctcctagaggtcaatgaagaatctactgtatctgaagctggtcctaaccaaacgtttgaggttccaaataaaatcatcaacagagcaaaggaaactctgaagattgatattcttcacaaacaagcttcaggaaatattgtatatggggtatttatgctacataagaaaacagtaaatcagaagaccacaatctacgaaattcaggatgatagaggaaaaatggatgtagtggggacaggacaatgtcacaatatcccctgtgaagaaggagataagctccaacttttctgctttcgacttagaaaaaagaaccagatgtcaaaactgatttcagaaatgcatagttttatccagataaagaaaaaaacaaacccgagaaacaatgaccccaagagcatgaagctaccccaggaacagagtcagcttccaaatccttcagaggccagcacaaccttccctgagagccatcttcggactcctcagatgccaccaacaactccatccagcagtttcttcaccaagaaaagtgaagacacaatctccaaaatgaatgacttcatgaggatgcagatactgaaggaagggagtcattttccaggaccgttcatgaccagcataggcccagctgagagccatccccacactcctcagatgcctccatcaacaccaagcagcagtttcttaaccacgttgaaaccaagactgaagactgaacctgaagaagtttccatagaagacagtgcccagagtgacctcaaagaagtgatggtgctgaacgcaacagaatcatttgtatatgagcccaaagagcagaagaaaatgtttcatgccacagtggcaactgagaatgaagtcttccgagtgaaggtttttaatattgacctaaaggagaagttcaccccaaagaagatcattgccatagcaaattatgtttgccgcaatgggttcctggaggtatatcctttcacacttgtggctgatgtgaatgctgaccgaaacatggagatcccaaaaggattgattagaagtgccagcgtaactcctaaaatcaatcagctttgctcacaaactaaaggaagttttgtgaatggggtgtttgaggtacataagaaaaatgtaaggggtgaattcacttattatgaaatacaagataatacagggaagatggaagtggtggtgcatggacgactgaccacaatcaactgtgaggaaggagataaactgaaactcacctgctttgaattggcaccgaaaagtgggaataccggggagttgagatctgtaattcatagtcacatcaaggtcatcaagaccaggaaaaacaagaaagacatactcaatcctgattcaagtatggaaacttcaccagactttttcttctaaaatctggatgtcattgacgataatgtttatggagataaggtctaagtgcctaaaaaaatgtacatatacctggttgaaatacaacactatacatacacaccaccatatatactagctgttaatcctatggaatggggtattgggagtgcttttttaatttttcatagtttttttttaataaaatggcatattttgcatctacaacttctataatttgaaaaaataaataaacattatcttttttgtgaaaggaa

SEQ ID NO: 1225 - DNA, 3592 bp, Homo sapiens
gaggaagaggctgaggaggcgcggggggcgggggaggctcaggagcgggcggtgacggcgacggcggcggcagaggaggcagcggctgggccgggccccgtgcgtctgtccgcgccccgtggatgcgaatcggccgcggcggaggcggcggcggcggaggaggcggcggcgggaggaggagtcggtgagccggctccgggccggaggggcgcggaggatgaggccgctgcctggcgctcttggcgtggcggcggccgccgcgctgtggctgctgctgctgctgctgccccggacccgggcggacgagcacgaacacacgtatcaagataaagaggaagttgtcttatggatgaatactgttgggccctaccataatcgtcaagaaacatataagtacttttcacttccattctgtgtggggtcaaaaaaaagtatcagtcattaccatgaaactctgggagaagcacttcaaggggttgaattggaatttagtggtctggatattaaatttaaagatgatgtgatgccagccacttactgtgaaattgatttagataaagaaaagagagatgcatttgtatatgccataaaaaatcattactggtaccagatgtacatagatgatttaccaatatggggtattgttggtgaggctgatgaaaatggagaagattactatctttggacctataaaaaacttgaaataggttttaatggaaatcgaattgttgatgttaatctaactagtgaaggaaaggtgaaactggttccaaatactaaaatccagatttcatattcagtaaaatggaaaaagtcagatgtgaaatttgaagatcgatttgacaaatatcttgatccgtccttttttcaacatcggattcattggttttcaattttcaactccttcatgatggtgatcttcttggtgggcttagtttcaatgattttaatgagaacattaagaaaagattatgctcggtacagtaaagaggaagaaatggatgatatggatagagacctaggagatgaatatggatggaaacaggtgcatggagatgtatttagaccatcaagtcacccactgatattttcctctctgattggttctggatgtcagatatttgctgtgtctctcatcgttattattgttgcaatgatagaagatttatatactgagaggggatcaatgctcagtacagccatatttgtctatgctgctacgtctccagtgaatggttattttggaggaagtctgtatgctagacaaggaggaaggagatggataaagcagatgtttattggggcattccttatcccagctatggtgtgtggcactgccttcttcatcaatttcatagccatttattaccatgcttcaagagccattccttttggaacaatggtggccgtttgttgcatctgtttttttgttattcttcctctaaatcttgttggtacaatacttggccgaaatctgtcaggtcagcccaactttccttgtcgtgtcaatgctgtgcctcgtcctataccggagaaaaaatggttcatggagcctgcggttattgtttgcctgggtggaattttaccttttggttcaatctttattgaaatgtatttcatcttcacgtctttctgggcatataagatctattatgtctatggcttcatgatgctggtgctggttatcctgtgcattgtgactgtctgtgtgactattgtgtgcacatattttctactaaatgcagaagattaccggtggcaatggacaagttttctctctgctgcatcaactgcaatctatgtttacatgtattccttttactactattttttcaaaacaaagatgtatggcttatttcaaacatcattttactttggatatatggcggtatttagcacagccttggggataatgtgtggagcgattggttacatgggaacaagtgcctttgtccgaaaaatctatactaatgtgaaaattgactagagacccaagaaaacctggaactttggatcaatttctttttcataggggtggaacttgcacagcaaaaacaaacaaacgcaagaagagatttgggctttaacacactgggtactttgtgggtctctctttcgtcggtggcttaaagtaacatctatttccattgatcctaggttcttcctgactgctttctccaactgttcacagcaaatgcttggattttatgcagtaggcattactacagtacatggctaatcttcccaaaaactagctcattaaagatgaaatagaccagctctcttcagtgaagaggacaaatagtttatttaaagcatttgttccaataaaataaatagagggaaacttggatgctaaaattacatgaataggaatcttcctggcacttagtgtttctatgttattgaaaaatgatgttccagaaagattacttttttcctcttatttttactgccattgtcgacctattgtgggacatttttatatattgaatctgggttcttttttgacttttttttttcccaatccaacagcatccttttttttaaaagagagaattagaaaatattaaatcctgcatgtaatatatctgctgtcatcttagttggaccaacttcccatttatttatcttaaaactatacagttacatcttaattccatccaaagaagatacagtttgaagacagaagtgtactctctacaatgcaatttactgtacagttagaaagcaaagtgttaaatggagaagatacttgtttttattaaacattttgagatttagataaactacattttaactgaatgtctaaagtgattatcttttttccccccaagttagtcttaaatcttttgggtttgaatgaaggttttacataagaaattattaaaaacaaggggggtgggtaataaatgtatataacattaaataatgtaacgtaggtgtagattcccaaatgcatttggatgtacagatcgactacagagtacttttttcttatgatgattggtgtagaaatgtgtgatttgggtgggcttttacatcttgcctaccattgcatgaaacattggggtttcttcaaaatgtgtgtgtcatacttcttttgggaggggggttgttttcttctgtttattttctgagactcctacaggagccaaatttgtaatttagagacacttaattttgttaatcctgtctgggacacttaagtaacatctaaagcattattgctttagaatgttcaaataaaatttcctgaccaaattgttttgtggaaatagatgtgtttgcaatttgaagatatctttctgtccagaaggcaaaattaccgaatgccatttttaaaagtatgctataaactatgctactctcatacaggggacccgtattttaaaatctccagacttgcttacatctagattatccagcacaatcataaagtgaatgacaaaccctttgaatgaaattgtggcacaaaatctgttcaggttggtgtaccgtgtaaagtggggatggggtaaaagtggttaacgtactgttggatcaacaaataaaggttacagttttgtaagagaaaaaaaaaaaaaaaaaa

SEQ ID NO: 1226 - DNA, 8206 bp, Homo sapiens; identical to SEQ ID NO: 738

SEQ ID NO: 1227 - DNA, 9448 bp, Homo sapiens; identical to SEQ ID NO: 740

SEQ ID NO: 1228 - DNA, 1008 bp, Homo sapiens
gggaggagctggtctcgcgaggccgcgccccggttcgcgcgggcgtcgtgcacgcggttgtagctgcccggcggcggcagaagcggcgctcgcgccaagggacgtgtttctgcgctcgcgtggtcatggaggcgctgccgctgctagccgcgacaactccggaccacggccgccaccgaaggctgcttctgctgccgctactgctgttcctgctgccggctggagctgtgcagggctgggagacagaggagaggccccggactcgcgaagaggagtgccacttctacgcgggtggacaagtgtacccgggagaggcatcccgggtatcggtcgccgaccactccctgcacctaagcaaagcgaagatttccaagccagcgccctactgggaaggaacagctgtgatcgatggagaatttaaggagctgaagttaactgattatcgtgggaaatacttggttttcttcttctacccacttgatttcacatttgtgtgtccaactgaaattatcgcttttggcgacagacttgaagaattcagatctataaatactgaagtggtagcatgctctgttgattcacagtttacccatttggcctggattaatacccctcgaagacaaggaggacttgggccaataaggattccacttctttcagatttgacccatcagatctcaaaggactatggtgtatacctagaggactcaggccacactcttagaggtctcttcattattgatgacaaaggaatcctaagacaaattactctgaatgatcttcctgtgggtagatcagtggatgagacactacgtttggttcaagcattccagtacactgacaaacacggagaagtctgccctgctggctggaaacctggtagtgaaacaataatcccagatccagctggaaagctgaagtatttcgataaactgaattgagaaatacttcttcaagttatgatgcttgaaagttctcaataaagttcacggtttcattaccacattg

SEQ ID NO: 1229 - DNA, 911 bp, Homo sapiens
gtcatggaggcgctgccgctgctagccgcgacaactccggaccacggccgccaccgaaggctgcttctgctgccgctactgctgttcctgctgccggctggagctgtgcagggctgggagacagaggagaggccccggactcgcgaagaggagtgccacttctacgcgggtggacaagtgtacccgggagaggcatcccgggtatcggtcgccgaccactccctgcacctaagcaaagcgaagatttccaagccagcgccctactgggaaggaacagctgtgatcgatggagaatttaaggagctgaagttaactgattatcgtgggaaatacttggttttcttcttctacccacttgatttcacatttgtgtgtccaactgaaattatcgcttttggcgacagacttgaagaattcagatctataaatactgaagtggtagcatgctctgttgattcacagtttacccatttggcctggattaatacccctcgaagacaaggaggacttgggccaataaggattccacttctttcagatttgacccatcagatctcaaaggactatggtgtatacctagaggactcaggccacactcttagaggtctcttcattattgatgacaaaggaatcctaagacaaattactctgaatgatcttcctgtgggtagatcagtggatgagacactacgtttggttcaagcattccagtacactgacaaacacggagaagtctgccctgctggctggaaacctggtagtgaaacaataatcccagatccagctggaaagctgaagtatttcgataaactgaattgagaaatacttcttcaagttatgatgcttgaaagttctcaataaagttcacggtttcattaccaaaaaaaaaaaaaaaaaaaaaaaaaaaaaaa

SEQ ID NO: 1230 - DNA, 6938 bp, Homo sapiens
ctttgccttcaagtacaggccggggtccggaagcggtgataccccttctctttcccagtggccctcaaacttccttttcccgggtccttaagcgggccccgccgacagaggccaatcagagggcagcgcgagggggcggggccatagtttaaactaattgtgcgctcacagcgctggcgcgagcccacgaagaggtacgattccggagaatcgcgaggcagagcgggagcgcgcagccaggtggaaactaattctaagccagactgctggagatcaccctgttctagtgtgtggaggcttccaccaggaggcgcattggagtgactgtctggcatcaccaagatgacactccacgccacccggggggctgcactcctctcttgggtgaacagtctacacgtggctgaccctgtggaggctgtgctgcagctccaggactgcagcatcttcatcaagatcattgacagaatccatggcactgaagagggacagcaaatcttgaagcagccggtgtcagagagactggactttgtgtgcagttttctgcagaaaaatcgaaaacatccctcttccccagaatgcctggtatctgcacagaaggtgctagagggatcagagctggaactggcgaagatgaccatgctgctcttataccactctaccatgagctccaaaagtcccagggactgggaacagtttgaatataaaattcaggctgagttggctgtcattcttaaatttgtgctggaccatgaggacgggctaaaccttaatgaggacctagagaacttcctacagaaagctcctgtgccttctacctgttctagcacattccctgaagagctctccccacctagccaccaggccaagagggagattcgcttcctagagctacagaaggttgcctcctcttccagtgggaacaactttctctcaggttctccagcttctcccatgggtgatatcctgcagaccccacagttccagatgagacggctgaagaagcagcttgctgatgagagaagtaatagggatgagctggagctggagctagctgagaaccgcaagctcctcaccgagaaggatgcacagatagccatgatgcagcagcgcattgaccgcctagccctgctgaatgagaagcaggcggccagcccactggagcccaaggagcttgaggagctgcgtgacaagaatgagagccttaccatgcggctgcatgaaaccctgaagcagtgccaggacctgaagacagagaagagccagatggatcgcaaaatcaaccagctttcggaggagaatggagacctttcctttaagctgcgggagtttgccagtcatctgcagcagctacaggatgccctcaatgagctgacggaggagcacagcaaggccactcaggagtggctagagaagcaggcccagctggagaaggagctcagcgcagccctgcaggacaagaaatgccttgaagagaagaacgaaatccttcagggaaaactttcacagctggaagaacacttgtcccagctgcaggataacccaccccaggagaagggcgaggtgctgggtgatgtcttgcagctggaaaccttgaagcaagaggcagccactcttgctgcaaacaacacacagctccaagccagggtagagatgctggagactgagcgaggccagcaggaagccaagctgcttgctgagcggggccacttcgaagaagaaaagcagcagctgtctagcctgatcactgacctgcagagctccatctccaacctcagccaggccaaggaagagctggagcaggcctcccaggctcatggggcccggttgactgcccaggtggcctctctgacctctgagctcaccacactcaatgccaccatccagcaacaggatcaagaactggctggcctgaagcagcaggccaaagagaagcaggcccagctagcacagaccctccaacagcaagaacaggcctcccagggcctccgccaccaggtggagcagctaagcagtagcctgaagcagaaggagcagcagttgaaggaggtagcggagaagcaggaggcaactaggcaggaccatgcccagcaactggccactgctgcagaggagcgagaggcctccttaagggagcgggatgcggctctcaagcagctggaggcactggagaaggagaaggctgccaagctggagattctgcagcagcaacttcaggtggctaatgaagcccgggacagtgcccagacctcagtgacacaggcccagcgggagaaggcagagctgagccggaaggtggaggaactccaggcctgtgttgagacagcccgccaggaacagcatgaggcccaggcccaggttgcagagctagagttgcagctgcggtctgagcagcaaaaagcaactgagaaagaaagggtggcccaggagaaggaccagctccaggagcagctccaggccctcaaagagtccttgaaggtcaccaagggcagccttgaagaggagaagcgcagggctgcagatgccctggaagagcagcagcgttgtatctctgagctgaaggcagagacccgaagcctggtggagcagcataagcgggaacgaaaggagctggaagaagagagggctgggcgcaaggggctggaggctcgattacagcagcttggggaggcccatcaggctgagactgaagtcctgcggcgggagctggcagaggccatggctgcccagcacacagctgagagtgagtgtgagcagctcgtcaaagaagtagctgcctggcgtgagcggtatgaggatagccagcaagaggaggcacagtatggcgccatgttccaggaacagctgatgactttgaaggaggaatgtgagaaggcccgccaggagctgcaggaggcaaaggagaaggtggcaggcatagaatcccacagcgagctccagataagccggcagcagaacgaactagctgagctccatgccaacctggccagagcactccagcaggtccaagagaaggaagtcagggcccagaagcttgcagatgacctctccactctgcaggaaaagatggctgccaccagcaaagaggtggcccgcttggagaccttggtgcgcaaggcaggtgagcagcaggaaacagcctcccgggagttagtcaaggagcctgcgagggcaggagacagacagcccgagtggctggaagagcaacagggacgccagttctgcagcacacaggcagcgctgcaggctatggagcgggaggcagagcagatgggcaatgagctggaacggctgcgggccgcgctgatggagagccaggggcagcagcaggaggagcgtgggcagcaggaaagggaggtggcgcggctgacccaggagcggggccgtgcccaggctgaccttgccctggagaaggcggccagagcagagcttgagatgcggctgcagaacgccctcaacgagcagcgtgtggagttcgctaccctgcaagaggcactggctcatgccctgacggaaaaggaaggcaaggaccaggagttggccaagcttcgtggtctggaggcagcccagataaaagagctggaggaacttcggcaaaccgtgaagcaactgaaggaacagctggctaagaaagaaaaggagcacgcatctggctcaggagcccaatctgaggctgctggcaggacagagccaacaggccccaagctggaggcactgcgggcagaggtgagcaagctggaacagcaatgccagaagcagcaggagcaggctgacagcctggaacgcagcctcgaggctgagcgggcctcccgggctgagcgggacagtgctctggagactctgcagggccagttagaggagaaggcccaggagctagggcacagtcagagtgccttagcctcggcccaacgggagttggctgccttccgcaccaaggtacaagaccacagcaaggctgaagatgagtggaaggcccaggtggcccggggccggcaagaggctgagaggaaaaatagcctcatcagcagcttggaggaggaggtgtccatcctgaatcgccaggtcctggagaaggagggggagagcaaggagttgaagcggctggtgatggccgagtcagagaagagccagaagctggaggagaggctgcgcctgctgcaggcagagacagccagcaacagtgccagagctgcagaacgcagctctgctctgcgggaggaggtgcagagcctccgggaggaggctgagaaacagcgggtggcttcagagaacctgcggcaggagctgacctcacaggctgagcgtgcggaggagctgggccaagaattgaaggcgtggcaggagaagttcttccagaaagagcaggccctctccaccctgcagctcgagcacaccagcacacaggccctggtgagtgagctgctgccagctaagcacctctgccagcagctgcaggccgagcaggccgctgccgagaaacgccaccgtgaggagctggagcagagcaagcaggccgctgggggactgcgggcagagctgctgcgggcccagcgggagcttggggagctgattcctctgcggcagaaggtggcagagcaggagcgaacagctcagcagctgcgggcagagaaggccagctatgcagagcagctgagcatgctgaagaaggcgcatggcctgctggcagaggagaaccgggggctgggtgagcgggccaaccttggccggcagtttctggaagtggagttggaccaggcccgggagaagtatgtccaagagttggcagccgtacgtgctgatgctgagacccgtctggctgaggtgcagcgagaagcacagagcactgcccgggagctggaggtgatgactgccaagtatgagggtgccaaggtcaaggtcctggaggagaggcagcggttccaggaagagaggcagaaactcactgcccaggtggaagaactgagtaagaaactggctgactctgaccaagccagcaaggtgcagcagcagaagctgaaggctgtccaggctcagggaggcgagagccagcaggaggcccagcgcctccaggcccagctgaatgaactgcaagcccagttgagccagaaggagcaggcagctgagcactataagctgcagatggagaaagccaaaacacattatgatgccaagaagcagcagaaccaagagctgcaggagcagctgcggagcctggagcagctgcagaaggaaaacaaagagctgcgagctgaagctgaacggctgggccatgagctacagcaggctgggctgaagaccaaggaggctgaacagacctgccgccaccttactgcccaggtgcgcagcctggaggcacaggttgcccatgcagaccagcagcttcgagacctgggcaaattccaggtggcaactgatgctttaaagagccgtgagccccaggctaagccccagctggacttgagtattgacagcctggatctgagctgcgaggaggggaccccactcagtatcaccagcaagctgcctcgtacccagccagacggcaccagcgtccctggagaaccagcctcacctatctcccagcgcctgccccccaaggtagaatccctggagagtctctacttcactcccatccctgctcggagtcaggcccccctggagagcagcctggactccctgggagacgtcttcctggactcgggtcgtaagacccgctccgctcgtcggcgcaccacgcagatcatcaacatcaccatgaccaagaagctagatgtggaagagccagacagcgccaactcatcgttctacagcacgcggtctgctcctgcttcccaggctagcctgcgagccacctcctctactcagtctctagctcgcctgggttctcccgattatggcaactcagccctgctcagcttgcctggctaccgccccaccactcgcagttctgctcgtcgttcccaggccggggtgtccagtggggcccctccaggaaggaacagcttctacatgggcacttgccaggatgagcctgagcagctggatgactggaaccgcattgcagagctgcagcagcgcaatcgagtgtgccccccacatctgaagacctgctatcccctggagtccaggccttccctgagcctgggcaccatcacagatgaggagatgaaaactggagacccccaagagaccctgcgccgagccagcatgcagccaatccagatagccgagggcactggcatcaccacccggcagcagcgcaaacgggtctccctagagccccaccagggccctggaactcctgagtctaagaaggccaccagctgtttcccacgccccatgactccccgagaccgacatgaagggcgcaaacagagcactactgaggcccagaagaaagcagctccagcttctactaaacaggctgaccggcgccagtcgatggccttcagcatcctcaacacacccaagaagctagggaacagccttctgcggcggggagcctcaaagaaggccctgtccaaggcttcccccaacactcgcagtggaacccgccgttctccgcgcattgccaccaccacagccagcgccgccactgctgccgccattggtgccacccctcgagccaagggcaaggtagaggcactggcaggatgggggagggaaacccgatgagagcatgggcaccccccagaccgccccaccaagtagcatccaagatggggccacgccaggctgctggagggtgtggggtaagaggtgtccctgtcctggtagctcctctccaaggagagaagacagatggccccattctcatggagagcacccagagctgctcaggcacagccagcaactgataaccctggggctcacaagggaggggatccagacaggggcgtgggagcaggaagagatcttcccagccagtgggtgcaggc

SEQ ID NO: 1231 - DNA, 6992 bp, Homo sapiens
ctttgccttcaagtacaggccggggtccggaagcggtgataccccttctctttcccagtggccctcaaacttccttttcccgggtccttaagcgggccccgccgacagaggccaatcagagggcagcgcgagggggcggggccatagtttaaactaattgtgcgctcacagcgctggcgcgagcccacgaagaggtacgattccggagaatcgcgaggcagagcgggagcgcgcagccaggtggaaactaattctaagccagactgctggagatcaccctgttctagtgtgtggaggcttccaccaggaggcgcattggagtgactgtctggcatcaccaagatgacactccacgccacccggggggctgcactcctctcttgggtgaacagtctacacgtggctgaccctgtggaggctgtgctgcagctccaggactgcagcatcttcatcaagatcattgacagaatccatggcactgaagagggacagcaaatcttgaagcagccggtgtcagagagactggactttgtgtgcagttttctgcagaaaaatcgaaaacatccctcttccccagaatgcctggtatctgcacagaaggtgctagagggatcagagctggaactggcgaagatgaccatgctgctcttataccactctaccatgagctccaaaagtcccagggactgggaacagtttgaatataaaattcaggctgagttggctgtcattcttaaatttgtgctggaccatgaggacgggctaaaccttaatgaggacctagagaacttcctacagaaagctcctgtgccttctacctgttctagcacattccctgaagagctctccccacctagccaccaggccaagagggagattcgcttcctagagctacagaaggttgcctcctcttccagtgggaacaactttctctcaggttctccagcttctcccatgggtgatatcctgcagaccccacagttccagatgagacggctgaagaagcagcttgctgatgagagaagtaatagggatgagctggagctggagctagctgagaaccgcaagctcctcaccgagaaggatgcacagatagccatgatgcagcagcgcattgaccgcctagccctgctgaatgagaagcaggcggccagcccactggagcccaaggagcttgaggagctgcgtgacaagaatgagagccttaccatgcggctgcatgaaaccctgaagcagtgccaggacctgaagacagagaagagccagatggatcgcaaaatcaaccagctttcggaggagaatggagacctttcctttaagctgcgggagtttgccagtcatctgcagcagctacaggatgccctcaatgagctgacggaggagcacagcaaggccactcaggagtggctagagaagcaggcccagctggagaaggagctcagcgcagccctgcaggacaagaaatgccttgaagagaagaacgaaatccttcagggaaaactttcacagctggaagaacacttgtcccagctgcaggataacccaccccaggagaagggcgaggtgctgggtgatgtcttgcagctggaaaccttgaagcaagaggcagccactcttgctgcaaacaacacacagctccaagccagggtagagatgctggagactgagcgaggccagcaggaagccaagctgcttgctgagcggggccacttcgaagaagaaaagcagcagctgtctagcctgatcactgacctgcagagctccatctccaacctcagccaggccaaggaagagctggagcaggcctcccaggctcatggggcccggttgactgcccaggtggcctctctgacctctgagctcaccacactcaatgccaccatccagcaacaggatcaagaactggctggcctgaagcagcaggccaaagagaagcaggcccagctagcacagaccctccaacagcaagaacaggcctcccagggcctccgccaccaggtggagcagctaagcagtagcctgaagcagaaggagcagcagttgaaggaggtagcggagaagcaggaggcaactaggcaggaccatgcccagcaactggccactgctgcagaggagcgagaggcctccttaagggagcgggatgcggctctcaagcagctggaggcactggagaaggagaaggctgccaagctggagattctgcagcagcaacttcaggtggctaatgaagcccgggacagtgcccagacctcagtgacacaggcccagcgggagaaggcagagctgagccggaaggtggaggaactccaggcctgtgttgagacagcccgccaggaacagcatgaggcccaggcccaggttgcagagctagagttgcagctgcggtctgagcagcaaaaagcaactgagaaagaaagggtggcccaggagaaggaccagctccaggagcagctccaggccctcaaagagtccttgaaggtcaccaagggcagccttgaagaggagaagcgcagggctgcagatgccctggaagagcagcagcgttgtatctctgagctgaaggcagagacccgaagcctggtggagcagcataagcgggaacgaaaggagctggaagaagagagggctgggcgcaaggggctggaggctcgattacagcagcttggggaggcccatcaggctgagactgaagtcctgcggcgggagctggcagaggccatggctgcccagcacacagctgagagtgagtgtgagcagctcgtcaaagaagtagctgcctggcgtgagcggtatgaggatagccagcaagaggaggcacagtatggcgccatgttccaggaacagctgatgactttgaaggaggaatgtgagaaggcccgccaggagctgcaggaggcaaaggagaaggtggcaggcatagaatcccacagcgagctccagataagccggcagcagaacgaactagctgagctccatgccaacctggccagagcactccagcaggtccaagagaaggaagtcagggcccagaagcttgcagatgacctctccactctgcaggaaaagatggctgccaccagcaaagaggtggcccgcttggagaccttggtgcgcaaggcaggtgagcagcaggaaacagcctcccgggagttagtcaaggagcctgcgagggcaggagacagacagcccgagtggctggaagagcaacagggacgccagttctgcagcacacaggcagcgctgcaggctatggagcgggaggcagagcagatgggcaatgagctggaacggctgcgggccgcgctgatggagagccaggggcagcagcaggaggagcgtgggcagcaggaaagggaggtggcgcggctgacccaggagcggggccgtgcccaggctgaccttgccctggagaaggcggccagagcagagcttgagatgcggctgcagaacgccctcaacgagcagcgtgtggagttcgctaccctgcaagaggcactggctcatgccctgacggaaaaggaaggcaaggaccaggagttggccaagcttcgtggtctggaggcagcccagataaaagagctggaggaacttcggcaaaccgtgaagcaactgaaggaacagctggctaagaaagaaaaggagcacgcatctggctcaggagcccaatctgaggctgctggcaggacagagccaacaggccccaagctggaggcactgcgggcagaggtgagcaagctggaacagcaatgccagaagcagcaggagcaggctgacagcctggaacgcagcctcgaggctgagcgggcctcccgggctgagcgggacagtgctctggagactctgcagggccagttagaggagaaggcccaggagctagggcacagtcagagtgccttagcctcggcccaacgggagttggctgccttccgcaccaaggtacaagaccacagcaaggctgaagatgagtggaaggcccaggtggcccggggccggcaagaggctgagaggaaaaatagcctcatcagcagcttggaggaggaggtgtccatcctgaatcgccaggtcctggagaaggagggggagagcaaggagttgaagcggctggtgatggccgagtcagagaagagccagaagctggaggagaggctgcgcctgctgcaggcagagacagccagcaacagtgccagagctgcagaacgcagctctgctctgcgggaggaggtgcagagcctccgggaggaggctgagaaacagcgggtggcttcagagaacctgcggcaggagctgacctcacaggctgagcgtgcggaggagctgggccaagaattgaaggcgtggcaggagaagttcttccagaaagagcaggccctctccaccctgcagctcgagcacaccagcacacaggccctggtgagtgagctgctgccagctaagcacctctgccagcagctgcaggccgagcaggccgctgccgagaaacgccaccgtgaggagctggagcagagcaagcaggccgctgggggactgcgggcagagctgctgcgggcccagcgggagcttggggagctgattcctctgcggcagaaggtggcagagcaggagcgaacagctcagcagctgcgggcagagaaggccagctatgcagagcagctgagcatgctgaagaaggcgcatggcctgctggcagaggagaaccgggggctgggtgagcgggccaaccttggccggcagtttctggaagtggagttggaccaggcccgggagaagtatgtccaagagttggcagccgtacgtgctgatgctgagacccgtctggctgaggtgcagcgagaagcacagagcactgcccgggagctggaggtgatgactgccaagtatgagggtgccaaggtcaaggtcctggaggagaggcagcggttccaggaagagaggcagaaactcactgcccaggtggaagaactgagtaagaaactggctgactctgaccaagccagcaaggtgcagcagcagaagctgaaggctgtccaggctcagggaggcgagagccagcaggaggcccagcgcctccaggcccagctgaatgaactgcaagcccagttgagccagaaggagcaggcagctgagcactataagctgcagatggagaaagccaaaacacattatgatgccaagaagcagcagaaccaagagctgcaggagcagctgcggagcctggagcagctgcagaaggaaaacaaagagctgcgagctgaagctgaacggctgggccatgagctacagcaggctgggctgaagaccaaggaggctgaacagacctgccgccaccttactgcccaggtgcgcagcctggaggcacaggttgcccatgcagaccagcagcttcgagacctgggcaaattccaggtggcaactgatgctttaaagagccgtgagccccaggctaagccccagctggacttgagtattgacagcctggatctgagctgcgaggaggggaccccactcagtatcaccagacataaagcactcatgacaattatacctgatttgtcccccaacaaccctctgagcaagctgcctcgtacccagccagacggcaccagcgtccctggagaaccagcctcacctatctcccagcgcctgccccccaaggtagaatccctggagagtctctacttcactcccatccctgctcggagtcaggcccccctggagagcagcctggactccctgggagacgtcttcctggactcgggtcgtaagacccgctccgctcgtcggcgcaccacgcagatcatcaacatcaccatgaccaagaagctagatgtggaagagccagacagcgccaactcatcgttctacagcacgcggtctgctcctgcttcccaggctagcctgcgagccacctcctctactcagtctctagctcgcctgggttctcccgattatggcaactcagccctgctcagcttgcctggctaccgccccaccactcgcagttctgctcgtcgttcccaggccggggtgtccagtggggcccctccaggaaggaacagcttctacatgggcacttgccaggatgagcctgagcagctggatgactggaaccgcattgcagagctgcagcagcgcaatcgagtgtgccccccacatctgaagacctgctatcccctggagtccaggccttccctgagcctgggcaccatcacagatgaggagatgaaaactggagacccccaagagaccctgcgccgagccagcatgcagccaatccagatagccgagggcactggcatcaccacccggcagcagcgcaaacgggtctccctagagccccaccagggccctggaactcctgagtctaagaaggccaccagctgtttcccacgccccatgactccccgagaccgacatgaagggcgcaaacagagcactactgaggcccagaagaaagcagctccagcttctactaaacaggctgaccggcgccagtcgatggccttcagcatcctcaacacacccaagaagctagggaacagccttctgcggcggggagcctcaaagaaggccctgtccaaggcttcccccaacactcgcagtggaacccgccgttctccgcgcattgccaccaccacagccagcgccgccactgctgccgccattggtgccacccctcgagccaagggcaaggtagaggcactggcaggatgggggagggaaacccgatgagagcatgggcaccccccagaccgccccaccaagtagcatccaagatggggccacgccaggctgctggagggtgtggggtaagaggtgtccctgtcctggtagctcctctccaaggagagaagacagatggccccattctcatggagagcacccagagctgctcaggcacagccagcaactgataaccctggggctcacaagggaggggatccagacaggggcgtgggagcaggaagagatcttcccagccagtgggtgcaggc

SEQ ID NO: 1232 - DNA, 4844 bp, Homo sapiens
catggcttcccttctgcttgctgtctgatccacagaacgctggggttgcccaggataatgtgaggctgagctcactaagagtgggtgggttaggggaatgaataatcattcctgtccctttgccccttccctaggtggaaactaattctaagccagactgctggagatcaccctgttctagtgtgtggaggcttccaccaggaggcgcattggagtgactgtctggcatcaccaagatgacactccacgccacccggggggctgcactcctctcttgggtgaacagtctacacgtggctgaccctgtggaggctgtgctgcagctccaggactgcagcatcttcatcaagatcattgacagaatccatggcactgaagagggacagcaaatcttgaagcagccggtgtcagagagactggactttgtgtgcagttttctgcagaaaaatcgaaaacatccctcttccccagaatgcctggtatctgcacagaaggtgctagagggatcagagctggaactggcgaagatgaccatgctgctcttataccactctaccatgagctccaaaagtcccagggactgggaacagtttgaatataaaattcaggctgagttggctgtcattcttaaatttgtgctggaccatgaggacgggctaaaccttaatgaggacctagagaacttcctacagaaagctcctgtgccttctacctgttctagcacattccctgaagagctctccccacctagccaccaggccaagagggagattcgcttcctagagctacagaaggttgcctcctcttccagtgggaacaactttctctcaggttctccagcttctcccatgggtgatatcctgcagaccccacagttccagatgagacggctgaagaagcagcttgctgatgagagaagtaatagggatgagctggagctggagctagctgagaaccgcaagctcctcaccgagaaggatgcacagatagccatgatgcagcagcgcattgaccgcctagccctgctgaatgagaagcaggcggccagcccactggagcccaaggagcttgaggagctgcgtgacaagaatgagagccttaccatgcggctgcatgaaaccctgaagcagtgccaggacctgaagacagagaagagccagatggatcgcaaaatcaaccagctttcggaggagaatggagacctttcctttaagctgcgggagtttgccagtcatctgcagcagctacaggatgccctcaatgagctgacggaggagcacagcaaggccactcaggagtggctagagaagcaggcccagctggagaaggagctcagcgcagccctgcaggacaagaaatgccttgaagagaagaacgaaatccttcagggaaaactttcacagctggaagaacacttgtcccagctgcaggataacccaccccaggagaagggcgaggtgctgggtgatgtcttgcagctggaaaccttgaagcaagaggcagccactcttgctgcaaacaacacacagctccaagccagggtagagatgctggagactgagcgaggccagcaggaagccaagctgcttgctgagcggggccacttcgaagaagaaaagcagcagctgtctagcctgatcactgacctgcagagctccatctccaacctcagccaggccaaggaagagctggagcaggcctcccaggctcatggggcccggttgactgcccaggtggcctctctgacctctgagctcaccacactcaatgccaccatccagcaacaggatcaagaactggctggcctgaagcagcaggccaaagagaagcaggcccagctagcacagaccctccaacagcaagaacaggcctcccagggcctccgccaccaggtggagcagctaagcagtagcctgaagcagaaggagcagcagttgaaggaggtagcggagaagcaggaggcaactaggcaggaccatgcccagcaactggccactgctgcagaggagcgagaggcctccttaagggagcgggatgcggctctcaagcagctggaggcactggagaaggagaaggctgccaagctggagattctgcagcagcaacttcaggtggctaatgaagcccgggacagtgcccagacctcagtgacacaggcccagcgggagaaggcagagctgagccggaaggtggaggaactccaggcctgtgttgagacagcccgccaggaacagcatgaggcccaggcccaggttgcagagctagagttgcagctgcggtctgagcagcaaaaagcaactgagaaagaaagggtggcccaggagaaggaccagctccaggagcagctccaggccctcaaagagtccttgaaggtcaccaagggcagccttgaagaggagaagcgcagggctgcagatgccctggaagagcagcagcgttgtatctctgagctgaaggcagagacccgaagcctggtggagcagcataagcgggaacgaaaggagctggaagaagagagggctgggcgcaaggggctggaggctcgattacagcagcttggggaggcccatcaggctgagactgaagtcctgcggcgggagctggcagaggccatggctgcccagcacacagctgagagtgagtgtgagcagctcgtcaaagaagtagctgcctggcgtgagcggtatgaggatagccagcaagaggaggcacagtatggcgccatgttccaggaacagctgatgactttgaaggaggaatgtgagaaggcccgccaggagctgcaggaggcaaaggagaaggtggcaggcatagaatcccacagcgagctccagataagccggcagcagaacgaactagctgagctccatgccaacctggccagagcactccagcaggtccaagagaaggaagtcagggcccagaagcttgcagatgacctctccactctgcaggaaaagatggctgccaccagcaaagaggtggcccgcttggagaccttggtgcgcaaggcaggtgagcagcaggaaacagcctcccgggagttagtcaaggagcctgcgagggcaggagacagacagcccgagtggctggaagagcaacagggacgccagttctgcagcacacaggcagcgctgcaggctatggagcgggaggcagagcagatgggcaatgagctggaacggctgcgggccgcgctgatggagagccaggggcagcagcaggaggagcgtgggcagcaggaaagggaggtggcgcggctgacccaggagcggggccgtgcccaggctgaccttgccctggagaaggcggccagagcagagcttgagatgcggctgcagaacgccctcaacgagcagcgtgtggagttcgctaccctgcaagaggcactggctcatgccctgacggaaaaggaaggcaaggaccaggagttggccaagcttcgtggtctggaggcagcccagataaaagagctggaggaacttcggcaaaccgtgaagcaactgaaggaacagctggctaagaaagaaaaggagcacgcatctggctcaggagcccaatctgaggctgctggcaggacagagccaacaggccccaagctggaggcactgcgggcagaggtgagcaagctggaacagcaatgccagaagcagcaggagcaggctgacagcctggaacgcagcctcgaggctgagcgggcctcccgggctgagcgggacagtgctctggagactctgcagggccagttagaggagaaggcccaggagctagggcacagtcagagtgccttagcctcggcccaacgggagttggctgccttccgcaccaaggtacaagaccacagcaaggctgaagatgagtggaaggcccaggtggcccggggccggcaagaggctgagaggaaaaatagcctcatcagcagcttggaggaggaggtgtccatcctgaatcgccaggtcctggagaaggagggggagagcaaggagttgaagcggctggtgatggccgagtcagagaagagccagaagctggaggagaggctgcgcctgctgcaggcagagacagccagcaacagtgccagagctgcagaacgcagctctgctctgcgggaggaggtgcagagcctccgggaggaggctgagaaacagcgggtggcttcagagaacctgcggcaggagctgacctcacaggctgagcgtgcggaggagctgggccaagaattgaaggcgtggcaggagaagttcttccagaaagagcaggccctctccaccctgcagctcgagcacaccagcacacaggccctggtgagtgagctgctgccagctaagcacctctgccagcagctgcaggccgagcaggccgctgccgagaaacgccaccgtgaggagctggagcagagcaagcaggccgctgggggactgcgggcagagctgctgcgggcccagcgggagcttggggagctgattcctctgcggcagaaggtggcagagcaggagcgaacagctcagcagctgcgggcagagaaggccagctatgcagagcagctgagcatgctgaagaaggcgcatggcctgctggcagaggagaaccgggggctgggtgagcgggccaaccttggccggcagtttctggaagtggagttggaccaggcccgggagaagtatgtccaagagttggcagccgtacgtgctgatgctgagacccgtctggctgaggtgcagcgagaagcacagagcactgcccgggagctggaggtgatgactgccaagtatgagggtgccaaggtcaaggtcctggaggagaggcagcggttccaggaagagaggcagaaactcactgcccag

SEQ ID NO: 1233 - DNA, 4894 bp, Homo sapiens
gtcccctgcttgctgtcgctcccagatcggggaagcttgctgtgcctttaaagaaagcagactcctggctgtgacgcacttctggctgtcagccaggaagatcgctcctgccaggcagactgagaagaaaaccaacaacttttcttttgtgtgtggggttactttccactggcccccccttcctcctctcctttcaagatttaaatgctaatggcggattaaaacctgtagatacgtttggctttaggagtctggcgcattggagtgactgtctggcatcaccaagatgacactccacgccacccggggggctgcactcctctcttgggtgaacagtctacacgtggctgaccctgtggaggctgtgctgcagctccaggactgcagcatcttcatcaagatcattgacagaatccatggcactgaagagggacagcaaatcttgaagcagccggtgtcagagagactggactttgtgtgcagttttctgcagaaaaatcgaaaacatccctcttccccagaatgcctggtatctgcacagaaggtgctagagggatcagagctggaactggcgaagatgaccatgctgctcttataccactctaccatgagctccaaaagtcccagggactgggaacagtttgaatataaaattcaggctgagttggctgtcattcttaaatttgtgctggaccatgaggacgggctaaaccttaatgaggacctagagaacttcctacagaaagctcctgtgccttctacctgttctagcacattccctgaagagctctccccacctagccaccaggccaagagggagattcgcttcctagagctacagaaggttgcctcctcttccagtgggaacaactttctctcaggttctccagcttctcccatgggtgatatcctgcagaccccacagttccagatgagacggctgaagaagcagcttgctgatgagagaagtaatagggatgagctggagctggagctagctgagaaccgcaagctcctcaccgagaaggatgcacagatagccatgatgcagcagcgcattgaccgcctagccctgctgaatgagaagcaggcggccagcccactggagcccaaggagcttgaggagctgcgtgacaagaatgagagccttaccatgcggctgcatgaaaccctgaagcagtgccaggacctgaagacagagaagagccagatggatcgcaaaatcaaccagctttcggaggagaatggagacctttcctttaagctgcgggagtttgccagtcatctgcagcagctacaggatgccctcaatgagctgacggaggagcacagcaaggccactcaggagtggctagagaagcaggcccagctggagaaggagctcagcgcagccctgcaggacaagaaatgccttgaagagaagaacgaaatccttcagggaaaactttcacagctggaagaacacttgtcccagctgcaggataacccaccccaggagaagggcgaggtgctgggtgatgtcttgcagctggaaaccttgaagcaagaggcagccactcttgctgcaaacaacacacagctccaagccagggtagagatgctggagactgagcgaggccagcaggaagccaagctgcttgctgagcggggccacttcgaagaagaaaagcagcagctgtctagcctgatcactgacctgcagagctccatctccaacctcagccaggccaaggaagagctggagcaggcctcccaggctcatggggcccggttgactgcccaggtggcctctctgacctctgagctcaccacactcaatgccaccatccagcaacaggatcaagaactggctggcctgaagcagcaggccaaagagaagcaggcccagctagcacagaccctccaacagcaagaacaggcctcccagggcctccgccaccaggtggagcagctaagcagtagcctgaagcagaaggagcagcagttgaaggaggtagcggagaagcaggaggcaactaggcaggaccatgcccagcaactggccactgctgcagaggagcgagaggcctccttaagggagcgggatgcggctctcaagcagctggaggcactggagaaggagaaggctgccaagctggagattctgcagcagcaacttcaggtggctaatgaagcccgggacagtgcccagacctcagtgacacaggcccagcgggagaaggcagagctgagccggaaggtggaggaactccaggcctgtgttgagacagcccgccaggaacagcatgaggcccaggcccaggttgcagagctagagttgcagctgcggtctgagcagcaaaaagcaactgagaaagaaagggtggcccaggagaaggaccagctccaggagcagctccaggccctcaaagagtccttgaaggtcaccaagggcagccttgaagaggagaagcgcagggctgcagatgccctggaagagcagcagcgttgtatctctgagctgaaggcagagacccgaagcctggtggagcagcataagcgggaacgaaaggagctggaagaagagagggctgggcgcaaggggctggaggctcgattacagcagcttggggaggcccatcaggctgagactgaagtcctgcggcgggagctggcagaggccatggctgcccagcacacagctgagagtgagtgtgagcagctcgtcaaagaagtagctgcctggcgtgagcggtatgaggatagccagcaagaggaggcacagtatggcgccatgttccaggaacagctgatgactttgaaggaggaatgtgagaaggcccgccaggagctgcaggaggcaaaggagaaggtggcaggcatagaatcccacagcgagctccagataagccggcagcagaacgaactagctgagctccatgccaacctggccagagcactccagcaggtccaagagaaggaagtcagggcccagaagcttgcagatgacctctccactctgcaggaaaagatggctgccaccagcaaagaggtggcccgcttggagaccttggtgcgcaaggcaggtgagcagcaggaaacagcctcccgggagttagtcaaggagcctgcgagggcaggagacagacagcccgagtggctggaagagcaacagggacgccagttctgcagcacacaggcagcgctgcaggctatggagcgggaggcagagcagatgggcaatgagctggaacggctgcgggccgcgctgatggagagccaggggcagcagcaggaggagcgtgggcagcaggaaagggaggtggcgcggctgacccaggagcggggccgtgcccaggctgaccttgccctggagaaggcggccagagcagagcttgagatgcggctgcagaacgccctcaacgagcagcgtgtggagttcgctaccctgcaagaggcactggctcatgccctgacggaaaaggaaggcaaggaccaggagttggccaagcttcgtggtctggaggcagcccagataaaagagctggaggaacttcggcaaaccgtgaagcaactgaaggaacagctggctaagaaagaaaaggagcacgcatctggctcaggagcccaatctgaggctgctggcaggacagagccaacaggccccaagctggaggcactgcgggcagaggtgagcaagctggaacagcaatgccagaagcagcaggagcaggctgacagcctggaacgcagcctcgaggctgagcgggcctcccgggctgagcgggacagtgctctggagactctgcagggccagttagaggagaaggcccaggagctagggcacagtcagagtgccttagcctcggcccaacgggagttggctgccttccgcaccaaggtacaagaccacagcaaggctgaagatgagtggaaggcccaggtggcccggggccggcaagaggctgagaggaaaaatagcctcatcagcagcttggaggaggaggtgtccatcctgaatcgccaggtcctggagaaggagggggagagcaaggagttgaagcggctggtgatggccgagtcagagaagagccagaagctggaggagaggctgcgcctgctgcaggcagagacagccagcaacagtgccagagctgcagaacgcagctctgctctgcgggaggaggtgcagagcctccgggaggaggctgagaaacagcgggtggcttcagagaacctgcggcaggagctgacctcacaggctgagcgtgcggaggagctgggccaagaattgaaggcgtggcaggagaagttcttccagaaagagcaggccctctccaccctgcagctcgagcacaccagcacacaggccctggtgagtgagctgctgccagctaagcacctctgccagcagctgcaggccgagcaggccgctgccgagaaacgccaccgtgaggagctggagcagagcaagcaggccgctgggggactgcgggcagagctgctgcgggcccagcgggagcttggggagctgattcctctgcggcagaaggtggcagagcaggagcgaacagctcagcagctgcgggcagagaaggccagctatgcagagcagctgagcatgctgaagaaggcgcatggcctgctggcagaggagaaccgggggctgggtgagcgggccaaccttggccggcagtttctggaagtggagttggaccaggcccgggagaagtatgtccaagagttggcagccgtacgtgctgatgctgagacccgtctggctgaggtgcagcgagaagcacagagcactgcccgggagctggaggtgatgactgccaagtatgagggtgccaaggtcaaggtcctggaggagaggcagcggttccaggaagagaggcagaaactcactgcccag

SEQ ID NO: 1234 - DNA, 2148 bp, Homo sapiens
ctttgccttcaagtacaggccggggtccggaagcggtgataccccttctctttcccagtggccctcaaacttccttttcccgggtccttaagcgggccccgccgacagaggccaatcagagggcagcgcgagggggcggggccatagtttaaactaattgtgcgctcacagcgctggcgcgagcccacgaagaggtacgattccggagaatcgcgaggcagagcgggagcgcgcagccaggtggaaactaattctaagccagactgctggagatcaccctgttctagtgtgtggaggcttccaccaggaggcgcattggagtgactgtctggcatcaccaagatgacactccacgccacccggggggctgcactcctctcttgggtgaacagtctacacgtggctgaccctgtggaggctgtgctgcagctccaggactgcagcatcttcatcaagatcattgacagaatccatggcactgaagagggacagcaaatcttgaagcagccggtgtcagagagactggactttgtgtgcagttttctgcagaaaaatcgaaaacatccctcttccccagaatgcctggtatctgcacagaaggtgctagagggatcagagctggaactggcgaagatgaccatgctgctcttataccactctaccatgagctccaaaagtcccagggactgggaacagtttgaatataaaattcaggctgagttggctgtcattcttaaatttgtgctggaccatgaggacgggctaaaccttaatgaggacctagagaacttcctacagaaagctcctgtgccttctacctgttctagcacattccctgaagagctctccccacctagccaccaggccaagagggagattcgcttcctagagctacagaaggttgcctcctcttccagtgggaacaactttctctcaggttctccagcttctcccatgggtgatatcctgcagaccccacagttccagatgagacggctgaagaagcagcttgctgatgagagaagtaatagggatgagctggagctggagctagctgagaaccgcaagctcctcaccgagaaggatgcacagatagccatgatgcagcagcgcattgaccgcctagccctgctgaatgagaagcaggcggccagcccactggagcccaaggagcttgaggagctgcgtgacaagaatgagagccttaccatgcggctgcatgaaaccctgaagcagtgccaggacctgaagacagagaagagccagatggatcgcaaaatcaaccagctttcggaggagaatggagacctttcctttaagctgcgggagtttgccagtcatctgcagcagctacaggatgccctcaatgagctgacggaggagcacagcaaggccactcaggagtggctagagaagcaggcccagctggagaaggagctcagcgcagccctgcaggacaaggtaaccctctgctggggtcacagccacagtcttgaccacatgtgcaaagctgagtccagtttaccactgtgctcttctgggcctttgggtattaagttgctttctcttcaaggttcaatagtgtgctgtaattgaaagattgtgggcttcagtctagtacaccttttttttttaacttatttttttttttccccagtcaatgccctcactttatagtacacctttcaatcctatctctgctgttcacaagatgtggatcttggacaagttaatcagtctgtttttctaagcatcctttccctaaaatgggagtagtaacgagtagctgcctcatcacctattatgagaaaacgtatgtaaagcacttcacacatcgtgtagtgtaaagtaagctctcagtgaaccagttgtgattgttactattggtaagaacccaatttggccacttactaataaccatgtagcccttgatcaaggcacttagcatctgcttcaggttcttgctctgtaagaggaatggtagtagctgcctcccacataagctgggtgtggtgatgcatgcctgtagtcccagctactcgggaggctgagacagaagaagctctcgaatctgggaggtggaggttgcagtaagccaagatctcgccactgcactccagcctaggcgatagagcgagactctgtctc

SEQ ID NO: 1235 - DNA, 3572 bp, Homo sapiens
ctttgccttcaagtacaggccggggtccggaagcggtgataccccttctctttcccagtggccctcaaacttccttttcccgggtccttaagcgggccccgccgacagaggccaatcagagggcagcgcgagggggcggggccatagtttaaactaattgtgcgctcacagcgctggcgcgagcccacgaagaggtacgattccggagaatcgcgaggcagagcgggagcgcgcagccaggtggaaactaattctaagccagactgctggagatcaccctgttctagtgtgtggaggcttccaccaggaggcgcattggagtgactgtctggcatcaccaagatgacactccacgccacccggggggctgcactcctctcttgggtgaacagtctacacgtggctgaccctgtggaggctgtgctgcagctccaggactgcagcatcttcatcaagatcattgacagaatccatggcactgaagagggacagcaaatcttgaagcagccggtgtcagagagactggactttgtgtgcagttttctgcagaaaaatcgaaaacatccctcttccccagaatgcctggtatctgcacagaaggtgctagagggatcagagctggaactggcgaagatgaccatgctgctcttataccactctaccatgagctccaaaagtcccagggactgggaacagtttgaatataaaattcaggctgagttggctgtcattcttaaatttgtgctggaccatgaggacgggctaaaccttaatgaggacctagagaacttcctacagaaagctcctgtgccttctacctgttctagcacattccctgaagagctctccccacctagccaccaggccaagagggagattcgcttcctagagctacagaaggttgcctcctcttccagtgggaacaactttctctcaggttctccagcttctcccatgggtgatatcctgcagaccccacagttccagatgagacggctgaagaagcagcttgctgatgagagaagtaatagggatgagctggagctggagctagctgagaaccgcaagctcctcaccgagaaggatgcacagatagccatgatgcagcagcgcattgaccgcctagccctgctgaatgagaagcaggcggccagcccactggagcccaaggagcttgaggagctgcgtgacaagaatgagagccttaccatgcggctgcatgaaaccctgaagcagtgccaggacctgaagacagagaagagccagatggatcgcaaaatcaaccagctttcggaggagaatggagacctttcctttaagctgcgggagtttgccagtcatctgcagcagctacaggatgccctcaatgagctgacggaggagcacagcaaggccactcaggagtggctagagaagcaggcccagctggagaaggagctcagcgcagccctgcaggacaagaaatgccttgaagagaagaacgaaatccttcagggaaaactttcacagctggaagaacacttgtcccagctgcaggataacccaccccaggagaagggcgaggtgctgggtgatgtcttgcaggtggaagaactgagtaagaaactggctgactctgaccaagccagcaaggtgcagcagcagaagctgaaggctgtccaggctcagggaggcgagagccagcaggaggcccagcgcctccaggcccagctgaatgaactgcaagcccagttgagccagaaggagcaggcagctgagcactataagctgcagatggagaaagccaaaacacattatgatgccaagaagcagcagaaccaagagctgcaggagcagctgcggagcctggagcagctgcagaaggaaaacaaagagctgcgagctgaagctgaacggctgggccatgagctacagcaggctgggctgaagaccaaggaggctgaacagacctgccgccaccttactgcccaggtgcgcagcctggaggcacaggttgcccatgcagaccagcagcttcgagacctgggcaaattccaggtggcaactgatgctttaaagagccgtgagccccaggctaagccccagctggacttgagtattgacagcctggatctgagctgcgaggaggggaccccactcagtatcaccagcaagctgcctcgtacccagccagacggcaccagcgtccctggagaaccagcctcacctatctcccagcgcctgccccccaaggtagaatccctggagagtctctacttcactcccatccctgctcggagtcaggcccccctggagagcagcctggactccctgggagacgtcttcctggactcgggtcgtaagacccgctccgctcgtcggcgcaccacgcagatcatcaacatcaccatgaccaagaagctagatgtggaagagccagacagcgccaactcatcgttctacagcacgcggtctgctcctgcttcccaggctagcctgcgagccacctcctctactcagtctctagctcgcctgggttctcccgattatggcaactcagccctgctcagcttgcctggctaccgccccaccactcgcagttctgctcgtcgttcccaggccggggtgtccagtggggcccctccaggaaggaacagcttctacatgggcacttgccaggatgagcctgagcagctggatgactggaaccgcattgcagagctgcagcagcgcaatcgagtgtgccccccacatctgaagacctgctatcccctggagtccaggccttccctgagcctgggcaccatcacagatgaggagatgaaaactggagacccccaagagaccctgcgccgagccagcatgcagccaatccagatagccgagggcactggcatcaccacccggcagcagcgcaaacgggtctccctagagccccaccagggccctggaactcctgagtctaagaaggccaccagctgtttcccacgccccatgactccccgagaccgacatgaagggcgcaaacagagcactactgaggcccagaagaaagcagctccagcttctactaaacaggctgaccggcgccagtcgatggccttcagcatcctcaacacacccaagaagctagggaacagccttctgcggcggggagcctcaaagaaggccctgtccaaggcttcccccaacactcgcagtggaacccgccgttctccgcgcattgccaccaccacagccagcgccgccactgctgccgccattggtgccacccctcgagccaagggcaaggtagaggcactggcaggatgggggagggaaacccgatgagagcatgggcaccccccagaccgccccaccaagtagcatccaagatggggccacgccaggctgctggagggtgtggggtaagaggtgtccctgtcctggtagctcctctccaaggagagaagacagatggccccattctcatggagagcacccagagctgctcaggcacagccagcaactgataaccctggggctcacaagggaggggatccagacaggggcgtgggagcaggaagagatcttcccagccagtgggtgcaggc

SEQ ID NO: 1236 - DNA, 8440 bp, Homo sapiens
ctttgccttcaagtacaggccggggtccggaagcggtgataccccttctctttcccagtggccctcaaacttccttttcccgggtccttaagcgggccccgccgacagaggccaatcagagggcagcgcgagggggcggggccatagtttaaactaattgtgcgctcacagcgctggcgcgagcccacgaagaggtacgattccggagaatcgcgaggcagagcgggagcgcgcagccaggtggaaactaattctaagccagactgctggagatcaccctgttctagtgtgtggaggcttccaccaggagtctggagtgcaatggcacgatctcggctcactgcaacctccacctcccaggttcaagcgattctcctgcctcagcctcccaagtagctgggattacaggcgcattggagtgactgtctggcatcaccaagatgacactccacgccacccggggggctgcactcctctcttgggtgaacagtctacacgtggctgaccctgtggaggctgtgctgcagctccaggactgcagcatcttcatcaagatcattgacagaatccatggcactgaagagggacagcaaatcttgaagcagccggtgtcagagagactggactttgtgtgcagttttctgcagaaaaatcgaaaacatccctcttccccagaatgcctggtatctgcacagaaggtgctagagggatcagagctggaactggcgaagatgaccatgctgctcttataccactctaccatgagctccaaaagtcccagggactgggaacagtttgaatataaaattcaggctgagttggctgtcattcttaaatttgtgctggaccatgaggacgggctaaaccttaatgaggacctagagaacttcctacagaaagctcctgtgccttctacctgttctagcacattccctgaagagctctccccacctagccaccaggccaagagggagattcgcttcctagagctacagaaggttgcctcctcttccagtgggaacaactttctctcaggttctccagcttctcccatgggtgatatcctgcagaccccacagttccagatgagacggctgaagaagcagcttgctgatgagagaagtaatagggatgagctggagctggagctagctgagaaccgcaagctcctcaccgagaaggatgcacagatagccatgatgcagcagcgcattgaccgcctagccctgctgaatgagaagcaggcggccagcccactggagcccaaggagcttgaggagctgcgtgacaagaatgagagccttaccatgcggctgcatgaaaccctgaagcagtgccaggacctgaagacagagaagagccagatggatcgcaaaatcaaccagctttcggaggagaatggagacctttcctttaagctgcgggagtttgccagtcatctgcagcagctacaggatgccctcaatgagctgacggaggagcacagcaaggccactcaggagtggctagagaagcaggcccagctggagaaggagctcagcgcagccctgcaggacaagaaatgccttgaagagaagaacgaaatccttcagggaaaactttcacagctggaagaacacttgtcccagctgcaggataacccaccccaggagaagggcgaggtgctgggtgatgtcttgcagctggaaaccttgaagcaagaggcagccactcttgctgcaaacaacacacagctccaagccagggtagagatgctggagactgagcgaggccagcaggaagccaagctgcttgctgagcggggccacttcgaagaagaaaagcagcagctgtctagcctgatcactgacctgcagagctccatctccaacctcagccaggccaaggaagagctggagcaggcctcccaggctcatggggcccggttgactgcccaggtggcctctctgacctctgagctcaccacactcaatgccaccatccagcaacaggatcaagaactggctggcctgaagcagcaggccaaagagaagcaggcccagctagcacagaccctccaacagcaagaacaggcctcccagggcctccgccaccaggtggagcagctaagcagtagcctgaagcagaaggagcagcagttgaaggaggtagcggagaagcaggaggcaactaggcaggaccatgcccagcaactggccactgctgcagaggagcgagaggcctccttaagggagcgggatgcggctctcaagcagctggaggcactggagaaggagaaggctgccaagctggagattctgcagcagcaacttcaggtggctaatgaagcccgggacagtgcccagacctcagtgacacaggcccagcgggagaaggcagagctgagccggaaggtggaggaactccaggcctgtgttgagacagcccgccaggaacagcatgaggcccaggcccaggttgcagagctagagttgcagctgcggtctgagcagcaaaaagcaactgagaaagaaagggtggcccaggagaaggaccagctccaggagcagctccaggccctcaaagagtccttgaaggtcaccaagggcagccttgaagaggagaagcgcagggctgcagatgccctggaagagcagcagcgttgtatctctgagctgaaggcagagacccgaagcctggtggagcagcataagcgggaacgaaaggagctggaagaagagagggctgggcgcaaggggctggaggctcgattacagcagcttggggaggcccatcaggctgagactgaagtcctgcggcgggagctggcagaggccatggctgcccagcacacagctgagagtgagtgtgagcagctcgtcaaagaagtagctgcctggcgtgagcggtatgaggatagccagcaagaggaggcacagtatggcgccatgttccaggaacagctgatgactttgaaggaggaatgtgagaaggcccgccaggagctgcaggaggcaaaggagaaggtggcaggcatagaatcccacagcgagctccagataagccggcagcagaacgaactagctgagctccatgccaacctggccagagcactccagcaggtccaagagaaggaagtcagggcccagaagcttgcagatgacctctccactctgcaggaaaagatggctgccaccagcaaagaggtggcccgcttggagaccttggtgcgcaaggcaggtgagcagcaggaaacagcctcccgggagttagtcaaggagcctgcgagggcaggagacagacagcccgagtggctggaagagcaacagggacgccagttctgcagcacacaggcagcgctgcaggctatggagcgggaggcagagcagatgggcaatgagctggaacggctgcgggccgcgctgatggagagccaggggcagcagcaggaggagcgtgggcagcaggaaagggaggtggcgcggctgacccaggagcggggccgtgcccaggctgaccttgccctggagaaggcggccagagcagagcttgagatgcggctgcagaacgccctcaacgagcagcgtgtggagttcgctaccctgcaagaggcactggctcatgccctgacggaaaaggaaggcaaggaccaggagttggccaagcttcgtggtctggaggcagcccagataaaagagctggaggaacttcggcaaaccgtgaagcaactgaaggaacagctggctaagaaagaaaaggagcacgcatctggctcaggagcccaatctgaggctgctggcaggacagagccaacaggccccaagctggaggcactgcgggcagaggtgagcaagctggaacagcaatgccagaagcagcaggagcaggctgacagcctggaacgcagcctcgaggctgagcgggcctcccgggctgagcgggacagtgctctggagactctgcagggccagttagaggagaaggcccaggagctagggcacagtcagagtgccttagcctcggcccaacgggagttggctgccttccgcaccaaggtacaagaccacagcaaggctgaagatgagtggaaggcccaggtggcccggggccggcaagaggctgagaggaaaaatagcctcatcagcagcttggaggaggaggtgtccatcctgaatcgccaggtcctggagaaggagggggagagcaaggagttgaagcggctggtgatggccgagtcagagaagagccagaagctggaggagaggctgcgcctgctgcaggcagagacagccagcaacagtgccagagctgcagaacgcagctctgctctgcgggaggaggtgcagagcctccgggaggaggctgagaaacagcgggtggcttcagagaacctgcggcaggagctgacctcacaggctgagcgtgcggaggagctgggccaagaattgaaggcgtggcaggagaagttcttccagaaagagcaggccctctccaccctgcagctcgagcacaccagcacacaggccctggtgagtgagctgctgccagctaagcacctctgccagcagctgcaggccgagcaggccgctgccgagaaacgccaccgtgaggagctggagcagagcaagcaggccgctgggggactgcgggcagagctgctgcgggcccagcgggagcttggggagctgattcctctgcggcagaaggtggcagagcaggagcgaacagctcagcagctgcgggcagagaaggccagctatgcagagcagctgagcatgctgaagaaggcgcatggcctgctggcagaggagaaccgggggctgggtgagcgggccaaccttggccggcagtttctggaagtggagttggaccaggcccgggagaagtatgtccaagagttggcagccgtacgtgctgatgctgagacccgtctggctgaggtgcagcgagaagcacagagcactgcccgggagctggaggtgatgactgccaagtatgagggtgccaaggtcaaggtcctggaggagaggcagcggttccaggaagagaggcagaaactcactgcccaggtggaagaactgagtaagaaactggctgactctgaccaagccagcaaggtgcagcagcagaagctgaaggctgtccaggctcagggaggcgagagccagcaggaggcccagcgcctccaggcccagctgaatgaactgcaagcccagttgagccagaaggagcaggcagctgagcactataagctgcagatggagaaagccaaaacacattatgatgccaagaagcagcagaaccaagagctgcaggagcagctgcggagcctggagcagctgcagaaggaaaacaaagagctgcgagctgaagctgaacggctgggccatgagctacagcaggctgggctgaagaccaaggaggctgaacagacctgccgccaccttactgcccaggtgcgcagcctggaggcacaggttgcccatgcagaccagcagcttcgagacctgggcaaattccaggtggcaactgatgctttaaagagccgtgagccccaggctaagccccagctggacttgagtattgacagcctggatctgagctgcgaggaggggaccccactcagtatcaccagcaagctgcctcgtacccagccagacggcaccagcgtccctggagaaccagcctcacctatctcccagcgcctgccccccaaggtagaatccctggagagtctctacttcactcccatccctgctcggagtcaggcccccctggagagcagcctggactccctgggagacgtcttcctggactcgggtcgtaagacccgctccgctcgtcggcgcaccacgcagatcatcaacatcaccatgaccaagaagctagatgtggaagagccagacagcgccaactcatcgttctacagcacgcggtctgctcctgcttcccaggctagcctgcgagccacctcctctactcagtctctagctcgcctgggttctcccgattatggcaactcagccctgctcagcttgcctggctaccgccccaccactcgcagttctgctcgtcgttcccaggccggggtgtccagtggggcccctccaggaaggaacagcttctacatgggcacttgccaggatgagcctgagcagctggatgactggaaccgcattgcagagctgcagcagcgcaatcgagtgtgccccccacatctgaagacctgctatcccctggagtccaggccttccctgagcctgggcaccatcacagatgaggagatgaaaactggagacccccaagagaccctgcgccgagccagcatgcagccaatccagatagccgagggcactggcatcaccacccggcagcagcgcaaacgggtctccctagagccccaccagggccctggaactcctgagtctaagaaggccaccagctgtttcccacgccccatgactccccgagaccgacatgaagggcgcaaacagagcactactgaggcccagaagaaagcagctccagcttctactaaacaggctgaccggcgccagtcgatggccttcagcatcctcaacacacccaagaagctagggaacagccttctgcggcggggagcctcaaagaaggccctgtccaaggcttcccccaacactcgcagtggaacccgccgttctccgcgcattgccaccaccacagccagcgccgccactgctgccgccattggtgccacccctcgagccaagggcaaggcaaagcactaaagggccagtaccagtgagtggccccacctgtgtccccgatgctgccgtcacctggtcctccgcctactgtccctctcagtgccttctctcagctcccaggccaacagtagccaaacccctagagacagtgatgcctgcccgcaccctggcctggtccctggtccttcactggcgccttctcggagctggcccagggggcctggagcatggacagtgtgggcgctctccctaccttgcctccttttttcttaaagcaaagtcacttctccatcacaaccagatttgaggctggttttgatggctgggtccttgggcctggccagtcttcctcttagcctctggatctagaagggaccataagaggagtaggccctggttcctgctgtcctggtggctgggcccagcaggggccctcactcttgaagtccaggactgggtctgacctggtgggagcacctgccagaggatgctctttcccaggacggatgggccctgtgtctcaggagtggggttgggggacagccttcagcagcagctcacaccctaccttccccagacttgcactggggtgggatttggagtgatgggaaggtttttaagggccggggatggatcttttctaaatgttattacttgtaaataaagtctatttttctcccgtgagtactgagttgacttgatcggtgtgggaaaaagaggaatataggctctttgaagcctaccttgttcctgctgagtcttccataccacctcctttctctcatcccttttcctgaggccacatctttccaggctcttcccactctccattagtggcctctgctcccggggagcattatgggctgttctctcttttctttttcaagcgcctgtgttcccctgaagcaggtgttgtcttcagcttctgtgtggcagtccctctctcccatactccctcgtgggacaggcaaagttcctgggagtggaactgaagcctaaatgaacagatgtcaggatgcctccattgaataatcctttatgaggacccatgtggggatgacacagatacagtgtggatccgaagcagctgctgcccccatcccttccctggaacagtccattagagtgaagggggaaaaaaaaaaacatacagcacgaagataggaagtctgcagaatgcggccagagctgaaagaggatgacttcactgaagaggcagcatttcaaccaggcttgagcgttcccctgctggggcggtgaggaagacgggactaaatgagcagagacatgggagtgggagctgtctgggaaaagcaagaatagttgggaggcttccagaaagtcatgtgggaaatgcaggtagggccctggagtgcaaggctaaggcatcaacagtcttggtggtttctgagcagtagagcagtgtgaggagtaggacgttaggaaggctaatggataggtggagagagaatggcaggaggaggaggcattataaggaggctgtgattttctaggtaggtgggaatggagtttgaatttggtgagagaagggacccaaagcagagaaggagggggtgtgttgcgcatccacgcagcctacaggcagtcagggactgttcactccaggtagacaggtaggacccaagctctggtcaaggttgtgctgctgctggccctgtgctgagtcttaaccctgctgctgtggactgctgtgg

SEQ ID NO: 1237 - DNA, 8342 bp, Homo sapiens
ctttgccttcaagtacaggccggggtccggaagcggtgataccccttctctttcccagtggccctcaaacttccttttcccgggtccttaagcgggccccgccgacagaggccaatcagagggcagcgcgagggggcggggccatagtttaaactaattgtgcgctcacagcgctggcgcgagcccacgaagaggtacgattccggagaatcgcgaggcagagcgggagcgcgcagccaggtggaaactaattctaagccagactgctggagatcaccctgttctagtgtgtggaggcttccaccaggaggcgcattggagtgactgtctggcatcaccaagatgacactccacgccacccggggggctgcactcctctcttgggtgaacagtctacacgtggctgaccctgtggaggctgtgctgcagctccaggactgcagcatcttcatcaagatcattgacagaatccatggcactgaagagggacagcaaatcttgaagcagccggtgtcagagagactggactttgtgtgcagttttctgcagaaaaatcgaaaacatccctcttccccagaatgcctggtatctgcacagaaggtgctagagggatcagagctggaactggcgaagatgaccatgctgctcttataccactctaccatgagctccaaaagtcccagggactgggaacagtttgaatataaaattcaggctgagttggctgtcattcttaaatttgtgctggaccatgaggacgggctaaaccttaatgaggacctagagaacttcctacagaaagctcctgtgccttctacctgttctagcacattccctgaagagctctccccacctagccaccaggccaagagggagattcgcttcctagagctacagaaggttgcctcctcttccagtgggaacaactttctctcaggttctccagcttctcccatgggtgatatcctgcagaccccacagttccagatgagacggctgaagaagcagcttgctgatgagagaagtaatagggatgagctggagctggagctagctgagaaccgcaagctcctcaccgagaaggatgcacagatagccatgatgcagcagcgcattgaccgcctagccctgctgaatgagaagcaggcggccagcccactggagcccaaggagcttgaggagctgcgtgacaagaatgagagccttaccatgcggctgcatgaaaccctgaagcagtgccaggacctgaagacagagaagagccagatggatcgcaaaatcaaccagctttcggaggagaatggagacctttcctttaagctgcgggagtttgccagtcatctgcagcagctacaggatgccctcaatgagctgacggaggagcacagcaaggccactcaggagtggctagagaagcaggcccagctggagaaggagctcagcgcagccctgcaggacaagaaatgccttgaagagaagaacgaaatccttcagggaaaactttcacagctggaagaacacttgtcccagctgcaggataacccaccccaggagaagggcgaggtgctgggtgatgtcttgcagctggaaaccttgaagcaagaggcagccactcttgctgcaaacaacacacagctccaagccagggtagagatgctggagactgagcgaggccagcaggaagccaagctgcttgctgagcggggccacttcgaagaagaaaagcagcagctgtctagcctgatcactgacctgcagagctccatctccaacctcagccaggccaaggaagagctggagcaggcctcccaggctcatggggcccggttgactgcccaggtggcctctctgacctctgagctcaccacactcaatgccaccatccagcaacaggatcaagaactggctggcctgaagcagcaggccaaagagaagcaggcccagctagcacagaccctccaacagcaagaacaggcctcccagggcctccgccaccaggtggagcagctaagcagtagcctgaagcagaaggagcagcagttgaaggaggtagcggagaagcaggaggcaactaggcaggaccatgcccagcaactggccactgctgcagaggagcgagaggcctccttaagggagcgggatgcggctctcaagcagctggaggcactggagaaggagaaggctgccaagctggagattctgcagcagcaacttcaggtggctaatgaagcccgggacagtgcccagacctcagtgacacaggcccagcgggagaaggcagagctgagccggaaggtggaggaactccaggcctgtgttgagacagcccgccaggaacagcatgaggcccaggcccaggttgcagagctagagttgcagctgcggtctgagcagcaaaaagcaactgagaaagaaagggtggcccaggagaaggaccagctccaggagcagctccaggccctcaaagagtccttgaaggtcaccaagggcagccttgaagaggagaagcgcagggctgcagatgccctggaagagcagcagcgttgtatctctgagctgaaggcagagacccgaagcctggtggagcagcataagcgggaacgaaaggagctggaagaagagagggctgggcgcaaggggctggaggctcgattacagcagcttggggaggcccatcaggctgagactgaagtcctgcggcgggagctggcagaggccatggctgcccagcacacagctgagagtgagtgtgagcagctcgtcaaagaagtagctgcctggcgtgagcggtatgaggatagccagcaagaggaggcacagtatggcgccatgttccaggaacagctgatgactttgaaggaggaatgtgagaaggcccgccaggagctgcaggaggcaaaggagaaggtggcaggcatagaatcccacagcgagctccagataagccggcagcagaacgaactagctgagctccatgccaacctggccagagcactccagcaggtccaagagaaggaagtcagggcccagaagcttgcagatgacctctccactctgcaggaaaagatggctgccaccagcaaagaggtggcccgcttggagaccttggtgcgcaaggcaggtgagcagcaggaaacagcctcccgggagttagtcaaggagcctgcgagggcaggagacagacagcccgagtggctggaagagcaacagggacgccagttctgcagcacacaggcagcgctgcaggctatggagcgggaggcagagcagatgggcaatgagctggaacggctgcgggccgcgctgatggagagccaggggcagcagcaggaggagcgtgggcagcaggaaagggaggtggcgcggctgacccaggagcggggccgtgcccaggctgaccttgccctggagaaggcggccagagcagagcttgagatgcggctgcagaacgccctcaacgagcagcgtgtggagttcgctaccctgcaagaggcactggctcatgccctgacggaaaaggaaggcaaggaccaggagttggccaagcttcgtggtctggaggcagcccagataaaagagctggaggaacttcggcaaaccgtgaagcaactgaaggaacagctggctaagaaagaaaaggagcacgcatctggctcaggagcccaatctgaggctgctggcaggacagagccaacaggccccaagctggaggcactgcgggcagaggtgagcaagctggaacagcaatgccagaagcagcaggagcaggctgacagcctggaacgcagcctcgaggctgagcgggcctcccgggctgagcgggacagtgctctggagactctgcagggccagttagaggagaaggcccaggagctagggcacagtcagagtgccttagcctcggcccaacgggagttggctgccttccgcaccaaggtacaagaccacagcaaggctgaagatgagtggaaggcccaggtggcccggggccggcaagaggctgagaggaaaaatagcctcatcagcagcttggaggaggaggtgtccatcctgaatcgccaggtcctggagaaggagggggagagcaaggagttgaagcggctggtgatggccgagtcagagaagagccagaagctggaggagaggctgcgcctgctgcaggcagagacagccagcaacagtgccagagctgcagaacgcagctctgctctgcgggaggaggtgcagagcctccgggaggaggctgagaaacagcgggtggcttcagagaacctgcggcaggagctgacctcacaggctgagcgtgcggaggagctgggccaagaattgaaggcgtggcaggagaagttcttccagaaagagcaggccctctccaccctgcagctcgagcacaccagcacacaggccctggtgagtgagctgctgccagctaagcacctctgccagcagctgcaggccgagcaggccgctgccgagaaacgccaccgtgaggagctggagcagagcaagcaggccgctgggggactgcgggcagagctgctgcgggcccagcgggagcttggggagctgattcctctgcggcagaaggtggcagagcaggagcgaacagctcagcagctgcgggcagagaaggccagctatgcagagcagctgagcatgctgaagaaggcgcatggcctgctggcagaggagaaccgggggctgggtgagcgggccaaccttggccggcagtttctggaagtggagttggaccaggcccgggagaagtatgtccaagagttggcagccgtacgtgctgatgctgagacccgtctggctgaggtgcagcgagaagcacagagcactgcccgggagctggaggtgatgactgccaagtatgagggtgccaaggtcaaggtcctggaggagaggcagcggttccaggaagagaggcagaaactcactgcccaggtggaagaactgagtaagaaactggctgactctgaccaagccagcaaggtgcagcagcagaagctgaaggctgtccaggctcagggaggcgagagccagcaggaggcccagcgcctccaggcccagctgaatgaactgcaagcccagttgagccagaaggagcaggcagctgagcactataagctgcagatggagaaagccaaaacacattatgatgccaagaagcagcagaaccaagagctgcaggagcagctgcggagcctggagcagctgcagaaggaaaacaaagagctgcgagctgaagctgaacggctgggccatgagctacagcaggctgggctgaagaccaaggaggctgaacagacctgccgccaccttactgcccaggtgcgcagcctggaggcacaggttgcccatgcagaccagcagcttcgagacctgggcaaattccaggtggcaactgatgctttaaagagccgtgagccccaggctaagccccagctggacttgagtattgacagcctggatctgagctgcgaggaggggaccccactcagtatcaccagcaagctgcctcgtacccagccagacggcaccagcgtccctggagaaccagcctcacctatctcccagcgcctgccccccaaggtagaatccctggagagtctctacttcactcccatccctgctcggagtcaggcccccctggagagcagcctggactccctgggagacgtcttcctggactcgggtcgtaagacccgctccgctcgtcggcgcaccacgcagatcatcaacatcaccatgaccaagaagctagatgtggaagagccagacagcgccaactcatcgttctacagcacgcggtctgctcctgcttcccaggctagcctgcgagccacctcctctactcagtctctagctcgcctgggttctcccgattatggcaactcagccctgctcagcttgcctggctaccgccccaccactcgcagttctgctcgtcgttcccaggccggggtgtccagtggggcccctccaggaaggaacagcttctacatgggcacttgccaggatgagcctgagcagctggatgactggaaccgcattgcagagctgcagcagcgcaatcgagtgtgccccccacatctgaagacctgctatcccctggagtccaggccttccctgagcctgggcaccatcacagatgaggagatgaaaactggagacccccaagagaccctgcgccgagccagcatgcagccaatccagatagccgagggcactggcatcaccacccggcagcagcgcaaacgggtctccctagagccccaccagggccctggaactcctgagtctaagaaggccaccagctgtttcccacgccccatgactccccgagaccgacatgaagggcgcaaacagagcactactgaggcccagaagaaagcagctccagcttctactaaacaggctgaccggcgccagtcgatggccttcagcatcctcaacacacccaagaagctagggaacagccttctgcggcggggagcctcaaagaaggccctgtccaaggcttcccccaacactcgcagtggaacccgccgttctccgcgcattgccaccaccacagccagcgccgccactgctgccgccattggtgccacccctcgagccaagggcaaggcaaagcactaaagggccagtaccagtgagtggccccacctgtgtccccgatgctgccgtcacctggtcctccgcctactgtccctctcagtgccttctctcagctcccaggccaacagtagccaaacccctagagacagtgatgcctgcccgcaccctggcctggtccctggtccttcactggcgccttctcggagctggcccagggggcctggagcatggacagtgtgggcgctctccctaccttgcctccttttttcttaaagcaaagtcacttctccatcacaaccagatttgaggctggttttgatggctgggtccttgggcctggccagtcttcctcttagcctctggatctagaagggaccataagaggagtaggccctggttcctgctgtcctggtggctgggcccagcaggggccctcactcttgaagtccaggactgggtctgacctggtgggagcacctgccagaggatgctctttcccaggacggatgggccctgtgtctcaggagtggggttgggggacagccttcagcagcagctcacaccctaccttccccagacttgcactggggtgggatttggagtgatgggaaggtttttaagggccggggatggatcttttctaaatgttattacttgtaaataaagtctatttttctcccgtgagtactgagttgacttgatcggtgtgggaaaaagaggaatataggctctttgaagcctaccttgttcctgctgagtcttccataccacctcctttctctcatcccttttcctgaggccacatctttccaggctcttcccactctccattagtggcctctgctcccggggagcattatgggctgttctctcttttctttttcaagcgcctgtgttcccctgaagcaggtgttgtcttcagcttctgtgtggcagtccctctctcccatactccctcgtgggacaggcaaagttcctgggagtggaactgaagcctaaatgaacagatgtcaggatgcctccattgaataatcctttatgaggacccatgtggggatgacacagatacagtgtggatccgaagcagctgctgcccccatcccttccctggaacagtccattagagtgaagggggaaaaaaaaaaacatacagcacgaagataggaagtctgcagaatgcggccagagctgaaagaggatgacttcactgaagaggcagcatttcaaccaggcttgagcgttcccctgctggggcggtgaggaagacgggactaaatgagcagagacatgggagtgggagctgtctgggaaaagcaagaatagttgggaggcttccagaaagtcatgtgggaaatgcaggtagggccctggagtgcaaggctaaggcatcaacagtcttggtggtttctgagcagtagagcagtgtgaggagtaggacgttaggaaggctaatggataggtggagagagaatggcaggaggaggaggcattataaggaggctgtgattttctaggtaggtgggaatggagtttgaatttggtgagagaagggacccaaagcagagaaggagggggtgtgttgcgcatccacgcagcctacaggcagtcagggactgttcactccaggtagacaggtaggacccaagctctggtcaaggttgtgctgctgctggccctgtgctgagtcttaaccctgctgctgtggactgctgtgg

SEQ ID NO: 1238 - DNA, 6980 bp, Homo sapiens
ctttgccttcaagtacaggccggggtccggaagcggtgataccccttctctttcccagtggccctcaaacttccttttcccgggtccttaagcgggccccgccgacagaggccaatcagagggcagcgcgagggggcggggccatagtttaaactaattgtgcgctcacagcgctggcgcgagcccacgaagaggtacgattccggagaatcgcgaggcagagcgggagcgcgcagccaggtggaaactaattctaagccagactgctggagatcaccctgttctagtgtgtggaggcttccaccaggaggcgcattggagtgactgtctggcatcaccaagatgacactccacgccacccggggggctgcactcctctcttgggtgaacagtctacacgtggctgaccctgtggaggctgtgctgcagctccaggactgcagcatcttcatcaagatcattgacagaatccatggcactgaagagggacagcaaatcttgaagcagccggtgtcagagagactggactttgtgtgcagttttctgcagaaaaatcgaaaacatccctcttccccagaatgcctggtatctgcacagaaggtgctagagggatcagagctggaactggcgaagatgaccatgctgctcttataccactctaccatgagctccaaaagtcccagggactgggaacagtttgaatataaaattcaggctgagttggctgtcattcttaaatttgtgctggaccatgaggacgggctaaaccttaatgaggacctagagaacttcctacagaaagctcctgtgccttctacctgttctagcacattccctgaagagctctccccacctagccaccaggccaagagggagattcgcttcctagagctacagaaggttgcctcctcttccagtgggaacaactttctctcaggttctccagcttctcccatgggtgatatcctgcagaccccacagttccagatgagacggctgaagaagcagcttgctgatgagagaagtaatagggatgagctggagctggagctagctgagaaccgcaagctcctcaccgagaaggatgcacagatagccatgatgcagcagcgcattgaccgcctagccctgctgaatgagaagcaggcggccagcccactggagcccaaggagcttgaggagctgcgtgacaagaatgagagccttaccatgcggctgcatgaaaccctgaagcagtgccaggacctgaagacagagaagagccagatggatcgcaaaatcaaccagctttcggaggagaatggagacctttcctttaagctgcgggagtttgccagtcatctgcagcagctacaggatgccctcaatgagctgacggaggagcacagcaaggccactcaggagtggctagagaagcaggcccagctggagaaggagctcagcgcagccctgcaggacaagaaatgccttgaagagaagaacgaaatccttcagggaaaactttcacagctggaagaacacttgtcccagctgcaggataacccaccccaggagaagggcgaggtgctgggtgatgtcttgcagctggaaaccttgaagcaagaggcagccactcttgctgcaaacaacacacagctccaagccagggtagagatgctggagactgagcgaggccagcaggaagccaagctgcttgctgagcggggccacttcgaagaagaaaagcagcagctgtctagcctgatcactgacctgcagagctccatctccaacctcagccaggccaaggaagagctggagcaggcctcccaggctcatggggcccggttgactgcccaggtggcctctctgacctctgagctcaccacactcaatgccaccatccagcaacaggatcaagaactggctggcctgaagcagcaggccaaagagaagcaggcccagctagcacagaccctccaacagcaagaacaggcctcccagggcctccgccaccaggtggagcagctaagcagtagcctgaagcagaaggagcagcagttgaaggaggtagcggagaagcaggaggcaactaggcaggaccatgcccagcaactggccactgctgcagaggagcgagaggcctccttaagggagcgggatgcggctctcaagcagctggaggcactggagaaggagaaggctgccaagctggagattctgcagcagcaacttcaggtggctaatgaagcccgggacagtgcccagacctcagtgacacaggcccagcgggagaaggcagagctgagccggaaggtggaggaactccaggcctgtgttgagacagcccgccaggaacagcatgaggcccaggcccaggttgcagagctagagttgcagctgcggtctgagcagcaaaaagcaactgagaaagaaagggtggcccaggagaaggaccagctccaggagcagctccaggccctcaaagagtccttgaaggtcaccaagggcagccttgaagaggagaagcgcagggctgcagatgccctggaagagcagcagcgttgtatctctgagctgaaggcagagacccgaagcctggtggagcagcataagcgggaacgaaaggagctggaagaagagagggctgggcgcaaggggctggaggctcgattacagcagcttggggaggcccatcaggctgagactgaagtcctgcggcgggagctggcagaggccatggctgcccagcacacagctgagagtgagtgtgagcagctcgtcaaagaagtagctgcctggcgtgagcggtatgaggatagccagcaagaggaggcacagtatggcgccatgttccaggaacagctgatgactttgaaggaggaatgtgagaaggcccgccaggagctgcaggaggcaaaggagaaggtggcaggcatagaatcccacagcgagctccagataagccggcagcagaacgaactagctgagctccatgccaacctggccagagcactccagcaggtccaagagaaggaagtcagggcccagaagcttgcagatgacctctccactctgcaggaaaagatggctgccaccagcaaagaggtggcccgcttggagaccttggtgcgcaaggcaggtgagcagcaggaaacagcctcccgggagttagtcaaggagcctgcgagggcaggagacagacagcccgagtggctggaagagcaacagggacgccagttctgcagcacacaggcagcgctgcaggctatggagcgggaggcagagcagatgggcaatgagctggaacggctgcgggccgcgctgatggagagccaggggcagcagcaggaggagcgtgggcagcaggaaagggaggtggcgcggctgacccaggagcggggccgtgcccaggctgaccttgccctggagaaggcggccagagcagagcttgagatgcggctgcagaacgccctcaacgagcagcgtgtggagttcgctaccctgcaagaggcactggctcatgccctgacggaaaaggaaggcaaggaccaggagttggccaagcttcgtggtctggaggcagcccagataaaagagctggaggaacttcggcaaaccgtgaagcaactgaaggaacagctggctaagaaagaaaaggagcacgcatctggctcaggagcccaatctgaggctgctggcaggacagagccaacaggccccaagctggaggcactgcgggcagaggtgagcaagctggaacagcaatgccagaagcagcaggagcaggctgacagcctggaacgcagcctcgaggctgagcgggcctcccgggctgagcgggacagtgctctggagactctgcagggccagttagaggagaaggcccaggagctagggcacagtcagagtgccttagcctcggcccaacgggagttggctgccttccgcaccaaggtacaagaccacagcaaggctgaagatgagtggaaggcccaggtggcccggggccggcaagaggctgagaggaaaaatagcctcatcagcagcttggaggaggaggtgtccatcctgaatcgccaggtcctggagaaggagggggagagcaaggagttgaagcggctggtgatggccgagtcagagaagagccagaagctggaggagaggctgcgcctgctgcaggcagagacagccagcaacagtgccagagctgcagaacgcagctctgctctgcgggaggaggtgcagagcctccgggaggaggctgagaaacagcgggtggcttcagagaacctgcggcaggagctgacctcacaggctgagcgtgcggaggagctgggccaagaattgaaggcgtggcaggagaagttcttccagaaagagcaggccctctccaccctgcagctcgagcacaccagcacacaggccctggtgagtgagctgctgccagctaagcacctctgccagcagctgcaggccgagcaggccgctgccgagaaacgccaccgtgaggagctggagcagagcaagcaggccgctgggggactgcgggcagagctgctgcgggcccagcgggagcttggggagctgattcctctgcggcagaaggtggcagagcaggagcgaacagctcagcagctgcgggcagagaaggccagctatgcagagcagctgagcatgctgaagaaggcgcatggcctgctggcagaggagaaccgggggctgggtgagcgggccaaccttggccggcagtttctggaagtggagttggaccaggcccgggagaagtatgtccaagagttggcagccgtacgtgctgatgctgagacccgtctggctgaggtgcagcgagaagcacagagcactgcccgggagctggaggtgatgactgccaagtatgagggtgccaaggtcaaggtcctggaggagaggcagcggttccaggaagagaggcagaaactcactgcccaggtggagcagctagaggtatttcagagagagcaaactaagcaggtggaagaactgagtaagaaactggctgactctgaccaagccagcaaggtgcagcagcagaagctgaaggctgtccaggctcagggaggcgagagccagcaggaggcccagcgcctccaggcccagctgaatgaactgcaagcccagttgagccagaaggagcaggcagctgagcactataagctgcagatggagaaagccaaaacacattatgatgccaagaagcagcagaaccaagagctgcaggagcagctgcggagcctggagcagctgcagaaggaaaacaaagagctgcgagctgaagctgaacggctgggccatgagctacagcaggctgggctgaagaccaaggaggctgaacagacctgccgccaccttactgcccaggtgcgcagcctggaggcacaggttgcccatgcagaccagcagcttcgagacctgggcaaattccaggtggcaactgatgctttaaagagccgtgagccccaggctaagccccagctggacttgagtattgacagcctggatctgagctgcgaggaggggaccccactcagtatcaccagcaagctgcctcgtacccagccagacggcaccagcgtccctggagaaccagcctcacctatctcccagcgcctgccccccaaggtagaatccctggagagtctctacttcactcccatccctgctcggagtcaggcccccctggagagcagcctggactccctgggagacgtcttcctggactcgggtcgtaagacccgctccgctcgtcggcgcaccacgcagatcatcaacatcaccatgaccaagaagctagatgtggaagagccagacagcgccaactcatcgttctacagcacgcggtctgctcctgcttcccaggctagcctgcgagccacctcctctactcagtctctagctcgcctgggttctcccgattatggcaactcagccctgctcagcttgcctggctaccgccccaccactcgcagttctgctcgtcgttcccaggccggggtgtccagtggggcccctccaggaaggaacagcttctacatgggcacttgccaggatgagcctgagcagctggatgactggaaccgcattgcagagctgcagcagcgcaatcgagtgtgccccccacatctgaagacctgctatcccctggagtccaggccttccctgagcctgggcaccatcacagatgaggagatgaaaactggagacccccaagagaccctgcgccgagccagcatgcagccaatccagatagccgagggcactggcatcaccacccggcagcagcgcaaacgggtctccctagagccccaccagggccctggaactcctgagtctaagaaggccaccagctgtttcccacgccccatgactccccgagaccgacatgaagggcgcaaacagagcactactgaggcccagaagaaagcagctccagcttctactaaacaggctgaccggcgccagtcgatggccttcagcatcctcaacacacccaagaagctagggaacagccttctgcggcggggagcctcaaagaaggccctgtccaaggcttcccccaacactcgcagtggaacccgccgttctccgcgcattgccaccaccacagccagcgccgccactgctgccgccattggtgccacccctcgagccaagggcaaggtagaggcactggcaggatgggggagggaaacccgatgagagcatgggcaccccccagaccgccccaccaagtagcatccaagatggggccacgccaggctgctggagggtgtggggtaagaggtgtccctgtcctggtagctcctctccaaggagagaagacagatggccccattctcatggagagcacccagagctgctcaggcacagccagcaactgataaccctggggctcacaagggaggggatccagacaggggcgtgggagcaggaagagatcttcccagccagtgggtgcaggc

SEQ ID NO: 1239 - DNA, 1391 bp, Homo sapiens
ctgcgggttctgcaaagtcaggctagctggctctccgcctgctccgcaccccggcgaggttccggtggggaggggtagggatggttcagccccgccccgctagggcggggcctgcgcctgcgcgctcagcggccgggcgtgtaacccacgggtgcgcgcccacgaccgccagactcgagcagtctctggaacacgctgcggggctcccgggcctgagccaggtctgttctccacgcaggtgttccgcgcgccccgttcagccatgtcgtccggcatccatgtagcgctggtgactggaggcaacaagggcatcggcttggccatcgtgcgcgacctgtgccggctgttctcgggggacgtggtgctcacggcgcgggacgtgacgcggggccaggcggccgtacagcagctgcaggcggagggcctgagcccgcgcttccaccagctggacatcgacgatctgcagagcatccgcgccctgcgcgacttcctgcgcaaggagtacgggggcctggacgtgctggtcaacaacgcgggcatcgccttcaaggttgctgatcccacaccctttcatattcaagctgaagtgacgatgaaaacaaatttctttggtacccgagatgtgtgcacagaattactccctctaataaaaccccaagggagagtggtgaacgtatctagcatcatgagcgtcagagcccttaaaagctgcagcccagagctgcagcagaagttccgcagtgagaccatcactgaggaggagctggtggggctcatgaacaagtttgtggaggatacaaagaagggagtgcaccagaaggagggctggcccagcagcgcatacggggtgacgaagattggcgtcaccgttctgtccaggatccacgccaggaaactgagtgagcagaggaaaggggacaagatcctcctgaatgcctgctgcccagggtgggtgagaactgacatggcgggacccaaggccaccaagagcccagaagaaggtgcagagacccctgtgtacttggcccttttgcccccagatgctgagggtccccatggacaatttgtttcagagaagagagttgaacagtggtgagctgggctcacagctccatccatgggccccattttgtaccttgtcctgagttggtccaaagggcatttacaatgtcataaatatccttatataagaaaaaaaatgatctcttatcaattagcactcactaatgtactactaattgagcaacctacgcactcagttgactacgtaaatctgtcaggtcttttgtgatttcctctgatgcaggagaggaaaaattgtaattgatgaaaataatgaatgaaaatcaacagatgaataaatggttctttataagtgtccatttgtacag

SEQ ID NO: 1240 - DNA, 1021 bp, Homo sapiens
ctggaacacgctgcggggctcccgggcctgagccaggtctgttctccacgcaggtgttccgcgcgccccgttcagccatgtcgtccggcatccatgtagcgctggtgactggaggcaacaagggcatcggcttggccatcgtgcgcgacctgtgccggctgttctcgggggacgtggtgctcacggcgcgggacgtgacgcggggccaggcggccgtacagcagctgcaggcggagggcctgagcccgcgcttccaccagctggacatcgacgatctgcagagcatccgcgccctgcgcgacttcctgcgcaaggagtacgggggcctggacgtgctggtcaacaacgcgggcatcgccttcaaggttgctgatcccacaccctttcatattcaagctgaagtgacgatgaaaacaaatttctttggtacccgagatgtgtgcacagaattactccctctaataaaaccccaagggagagtggtgaacgtatctagcatcatgagcgtcagagcccttaaaagctgcagcccagagctgcagcagaagttccgcagtgagaccatcactgaggaggagctggtggggctcatgaacaagtttgtggaggatacaaagaagggagtgcaccagaaggagggctggcccagcagcgcatacggggtgacgaagattggcgtcaccgttctgtccaggatccacgccaggaaactgagtgagcagaggaaaggggacaagatcctcctgaatgcctgctgcccagggtgggtgagaactgacatggcgggacccaaggccaccaagagcccagaagaaggtgcagagacccctgtgtacttggcccttttgcccccagatgctgagggtccccatggacaatttgtttcagagaagagagttgaacagtggtgagctgggctcacagctccatccatgggccccattttgtaccttgtcctgagttggtccaaagggcatttacaatgtcataaatatccttatataaaaaaaaaaaaaaaaaa

SEQ ID NO: 1241 - DNA, 1506 bp, Homo sapiens
attgcagtacatttgagaaagtaaaggtgtagtggaaaccgagagcgaaatgagggcgtagggagaaaagggtggggaagcttagagaccggtgagggagcagagctggggcgcctgtgtacagggatagagcccggcggcagcagggcgcggcttccctttcccggggcctggggccgcaatcaggtggagtcgagaggccggaggaggggcaggaggaaggggtgcggtcgcgatccggacccggagccagcgcggagcacctgcgcccgcggctgacaccttcgctcgcagtttgttcgcagtttactcgcacaccagtttcccccaccgcgctttggattagtgtgatctcagctcaaggcaaaggtgggatatcatggcatctatctgggttggacaccgaggaacagtaagagattatccagactttagcccatcagtggatgctgaagctattcagaaagcaatcagaggaattggaactgatgagaaaatgctcatcagcattctgactgagaggtcaaatgcacagcggcagctgattgttaaggaatatcaagcagcatatggaaaggagctgaaagatgacttgaagggtgatctctctggccactttgagcatctcatggtggccctagtgactccaccagcagtctttgatgcaaagcagctaaagaaatccatgaagggcgcgggaacaaacgaagatgccttgattgaaatcttaactaccaggacaagcaggcaaatgaaggatatctctcaagcctattatacagtatacaagaagagtcttggagatgacattagttccgaaacatctggtgacttccggaaagctctgttgactttggcagatgtaagaagagatgaaagtctgaaagtggatgagcatctggccaaacaagatgcccagattctctataaagctggtgagaacagatggggcacggatgaagacaaattcactgagatcctgtgtttaaggagctttcctcaattaaaactaacatttgatgaatacagaaatatcagccaaaaggacattgtggacagcataaaaggagaattatctgggcattttgaagacttactgttggccatagttaattgtgtgaggaacacgccggcctttttagccgaaagactgcatcgagccttgaagggtattggaactgatgagtttactctgaaccgaataatggtgtccagatcagaaattgaccttttggacattcgaacagagttcaagaagcattatggctattccctatattcagcaattaaatcggatacttctggagactatgaaatcacactcttaaaaatgggctttcccaacagctccaccttacttcttctcatactatttaagagaacaagcaaatataaacagcaacttgtgttcctaacaggaattttcattgttctataacaacaacaacaaaagcgattattattttagagcatctcatttataatgtagcagctcataaatgaaat

SEQ ID NO: 1242 - DNA, 1688 bp, Homo sapiens
attgcagtacatttgagaaagtaaaggtgtagtggaaaccgagagcgaaatgagggcgtagggagaaaagggtggggaagcttagagaccggtgagggagcagagctggggcgcctgtgtacagggatagagcccggcggcagcagggcgcggcttccctttcccggggcctggggccgcaatcaggtggagtcgagaggccggaggaggggcaggaggaaggggtgcggtcgcgatccggacccggagccagcgcggagcacctgcgcccgcggctgacaccttcgctcgcagtttgttcgcagtttactcgcacaccagtttcccccaccgcgctttggattagtgtgatctcagctcaaggcaaaggtgggatatcatggcatctatctgggttggacaccgaggaacagtaagagattatccagactttagcccatcagtggatgctgaagctattcagaaagcaatcagaggaattggaactgatgagaaaatgctcatcagcattctgactgagaggtcaaatgcacagcggcagctgattgttaaggaatatcaagcagcatatggaaaggagctgaaagatgacttgaagggtgatctctctggccactttgagcatctcatggtggccctagtgactccaccagcagtctttgatgcaaagcagctaaagaaatccatgaagggcgcgggaacaaacgaagatgccttgattgaaatcttaactaccaggacaagcaggcaaatgaaggatatctctcaagcctattatacagtatacaagaagagtcttggagatgacattagttccgaaacatctggtgacttccggaaagctctgttgactttggcagatggcagaagagatgaaagtctgaaagtggatgagcatctggccaaacaagatgcccagattctctataaagctggtgagaacagatggggcacggatgaagacaaattcactgagatcctgtgtttaaggagctttcctcaattaaaactaacatttgatgaatacagaaatatcagccaaaaggacattgtggacagcataaaaggagaattatctgggcattttgaagacttactgttggccatagttaattgtgtgaggaacacgccggcctttttagccgaaagactgcatcgagccttgaagggtattggaactgatgagtttactctgaaccgaataatggtgtccagatcagaaattgaccttttggacattcgaacagagttcaagaagcattatggctattccctatattcagcaattaaatcggatacttctggagactatgaaatcacactcttaaaaatctgtggtggagatgactgaaccaagaagataatctccaaaggtccacgatgggctttcccaacagctccaccttacttcttctcatactatttaagagaacaagcaaatataaacagcaacttgtgttcctaacaggaattttcattgttctataacaacaacaacaaaagcgattattattttagagcatctcatttataatgtagcagctcataaatgaaattgaaaatggtattaaagatctgcaactactatccaacttatatttctgctttcaaagttaagaatctttatagttctaatccattaaatataaagcaagataataaaaattgttgcttttgttaaaagtaat

SEQ ID NO: 1243 - DNA, 1268 bp, Homo sapiens
tagtgtgatctcagctcaaggcaaaggtgggatatcatggcatctatctgggttggacaccgaggaacagtaagagattatccagactttagcccatcagtggatgctgaagctattcagaaagcaatcagaggaattggaactgatgagaaaatgctcatcagcattctgactgagaggtcaaatgcacagcggcagctgattgttaaggaatatcaagcagcatatggaaaggagctgaaagatgacttgaagggtgatctctctggccactttgagcatctcatggtggccctagtgactccaccagcagtctttgatgcaaagcagctaaagaaatccatgaagggcgcgggaacaaacgaagatgccttgattgaaatcttaactaccaggacaagcaggcaaatgaaggatatctctcaagcctattatacagtatacaagaagagtcttggagatgacattagttccgaaacatctggtgacttccggaaagctctgttgactttggcagatggcagaagagatgaaagtctgaaagtggatgagcatctggccaaacaagatgcccagattctctataaagctggtgagaacagatggggcacggatgaagacaaattcactgagatcctgtgtttaaggagctttcctcaattaaaactaacatttgatgaatacagaaatatcagccaaaaggacattgtggacagcataaaaggagaattatctgggcattttgaagacttactgttggccatagttaattgtgtgaggaacacgccggcctttttagccgaaagactgcatcgagccttgaagggtattggaactgatgagtttactctgaaccgaataatggtgtccagatcagaaattgaccttttggacattcgaacagagttcaagaagcattatggctattccctatattcagcaattaaatcggatacttctggagactatgaaatcacactcttaaaaatctgtggtggagatgactgaaccaagaagataatctccaaaggtccacgatgggcttttccaacagctccaccttacttcttctcatactatttaagagaacaagcaaatataaacagcaacttgtgttcctaacaggaattttcattgttctataacaacaacaacaaaagcgattattattttagagcatctcatttataatgtagcagctcataaatgaaattgaaaatggtattaaagatctgcaactactatccaacttatatttctgctttcaa

SEQ ID NO: 1244 - DNA, 1691 bp, Homo sapiens
attgcagtacatttgagaaagtaaaggtgtagtggaaaccgagagcgaaatgagggcgtagggagaaaagggtggggaagcttagagaccggtgagggagcagagctggggcgcctgtgtacagggatagagcccggcggcagcagggcgcggcttccctttcccggggcctggggccgcaatcaggtggagtcgagaggccggaggaggggcaggaggaaggggtgcggtcgcgatccggacccggagccagcgcggagcacctgcgcccgcggctgacaccttcgctcgcagtttgttcgcagtttactcgcacaccagtttcccccaccgcgctttggattagtgtgatctcagctcaaggcaaaggtgggatatcatggctatttccttctaggttggacaccgaggaacagtaagagattatccagactttagcccatcagtggatgctgaagctattcagaaagcaatcagaggaattggaactgatgagaaaatgctcatcagcattctgactgagaggtcaaatgcacagcggcagctgattgttaaggaatatcaagcagcatatggaaaggagctgaaagatgacttgaagggtgatctctctggccactttgagcatctcatggtggccctagtgactccaccagcagtctttgatgcaaagcagctaaagaaatccatgaagggcgcgggaacaaacgaagatgccttgattgaaatcttaactaccaggacaagcaggcaaatgaaggatatctctcaagcctattatacagtatacaagaagagtcttggagatgacattagttccgaaacatctggtgacttccggaaagctctgttgactttggcagatgtaagaagagatgaaagtctgaaagtggatgagcatctggccaaacaagatgcccagattctctataaagctggtgagaacagatggggcacggatgaagacaaattcactgagatcctgtgtttaaggagctttcctcaattaaaactaacatttgatgaatacagaaatatcagccaaaaggacattgtggacagcataaaaggagaattatctgggcattttgaagacttactgttggccatagttaattgtgtgaggaacacgccggcctttttagccgaaagactgcatcgagccttgaagggtattggaactgatgagtttactctgaaccgaataatggtgtccagatcagaaattgaccttttggacattcgaacagagttcaagaagcattatggctattccctatattcagcaattaaatcggatacttctggagactatgaaatcacactcttaaaaatctgtggtggagatgactgaaccaagaagataatctccaaaggtccacgatgggctttcccaacagctccaccttacttcttctcatactatttaagagaacaagcaaatataaacagcaacttgtgttcctaacaggaattttcattgttctataacaacaacaacaaaagcgattattattttagagcatctcatttataatgtagcagctcataaatgaaattgaaaatggtattaaagatctgcaactactatccaacttatatttctgctttcaaagttaagaatctttatagttctaatccattaaatataaagcaagataataaaaattgttgcttttgttaaaagtaat

SEQ ID NO: 1245 - DNA, 1347 bp, Homo sapiens
attagtgtgatctcagctcaaggcaaaggtgggatatcatggcatctatctgggttggacaccgaggaacagtaagagattatccagactttagcccatcagtggatgctgaagctattcagaaagcaatcagaggaattggaactgatgagaaaatgctcatcagcattctgactgagaggtcaaatgcacagcggcagctgattgttaaggaatatcaagcagcatatggaaaggagctgaaagatgacttgaagggtgatctctctggccactttgagcatctcatggtggccctagtgactccaccagcagtctttgatgcaaagcagctaaagaaatccatgaagggcgcgggaacaaacgaagatgccttgattgaaatcttaactaccaggacaagcaggcaaatgaaggatatctctcaagcctattatacagtatacaagaagagtcttggagatgacattagttccgaaacatctggtgacttccggaaagctctgttgactttggcagatggcagaagagatgaaagtctgaaagtggatgagcatctggccaaacaagatgcccagattctctataaagctggtgagaacagatggggcacggatgaagacaaattcactgagatcctgtgtttaaggagctttcctcaattaaaactaacatttgatgaatacagaaatatcagccaaaaggacattgtggacagcataaaaggagaattatctgggcattttgaagacttactgttggccatagttaattgtgtgaggaacacgccggcctttttagccgaaagactgcatcgagccttgaagggtattggaactgatgagtttactctgaaccgaataatggtgtccagatcagaaattgaccttttggacattcgaacagagttcaagaagcattatggctattccctatattcagcaattaaatcggatacttctggagactatgaaatcacactcttaaaaatctgtggtggagatgactgaaccaagaagataatctccaaaggtccacgatgggctttcccaacagctccaccttacttcttctcatactatttaagagaacaagcaaatataaacagcaacttgtgttcctaacaggaattttcattgttctataacaacaacaacaaaagcgattattattttagagcatctcatttataatgtagcagctcataaatgaaattgaaaatggtattaaagatctgcaactactatccaacttatatttctgctttcaaagttaagaatctttatagttctaatccattaaatataaagcaagataataaaaattgttgcttttgttaaaagtaat

SEQ ID NO: 1246 - DNA, 3505 bp, Homo sapiens
ggatccggaagcacaggagaccaagagaccagagataccaggatgagagataggacccctggttgccaggttcgagaagtcctaggctgagtccctggaaatggtcgcacttggagggtctcgccgccagtggaaggagccaccgcccccgcccgaccatggccgaggagctggtcttagagaggtgtgatctggagctggagaccaatggccgagaccaccacacggccgacctgtgccgggagaagctggtggtgcgacggggccagcccttctggctgaccctgcactttgagggccgcaactacgaggccagtgtagacagtctcaccttcagtgtcgtgaccggcccagcccctagccaggaggccgggaccaaggcccgttttccactaagagatgctgtggaggagggtgactggacagccaccgtggtggaccagcaagactgcaccctctcgctgcagctcaccaccccggccaacgcccccatcggcctgtatcgcctcagcctggaggcctccactggctaccagggatccagctttgtgctgggccacttcattttgctcttcaacgcctggtgcccagcggatgctgtgtacctggactcggaagaggagcggcaggagtatgtcctcacccagcagggctttatctaccagggctcggccaagttcatcaagaacataccttggaattttgggcagtttgaagatgggatcctagacatctgcctgatccttctagatgtcaaccccaagttcctgaagaacgccggccgtgactgctcccgccgcagcagccccgtctacgtgggccgggtggtgagtggcatggtcaactgcaacgatgaccagggtgtgctgctgggacgctgggacaacaactacggggacggcgtcagccccatgtcctggatcggcagcgtggacatcctgcggcgctggaagaaccacggctgccagcgcgtcaagtatggccagtgctgggtcttcgccgccgtggcctgcacagtgctgaggtgcctgggcatccctacccgcgtcgtgaccaactacaactcggcccatgaccagaacagcaaccttctcatcgagtacttccgcaatgagtttggggagatccagggtgacaagagcgagatgatctggaacttccactgctgggtggagtcgtggatgaccaggccggacctgcagccggggtacgagggctggcaggccctggacccaacgccccaggagaagagcgaagggacgtactgctgtggcccagttccagttcgtgccatcaaggagggcgacctgagcaccaagtacgatgcgccctttgtctttgcggaggtcaatgccgacgtggtagactggatccagcaggacgatgggtctgtgcacaaatccatcaaccgttccctgatcgttgggctgaagatcagcactaagagcgtgggccgagacgagcgggaggatatcacccacacctacaaatacccagaggggtcctcagaggagagggaggccttcacaagggcgaaccacctgaacaaactggccgagaaggaggagacagggatggccatgcggatccgtgtgggccagagcatgaacatgggcagtgactttgacgtctttgcccacatcaccaacaacaccgctgaggagtacgtctgccgcctcctgctctgtgcccgcaccgtcagctacaatgggatcttggggcccgagtgtggcaccaagtacctgctcaacctcaacctggagcctttctctgagaagagcgttcctctttgcatcctctatgagaaataccgtgactgccttacggagtccaacctcatcaaggtgcgggccctcctcgtggagccagttatcaacagctacctgctggctgagagggacctctacctggagaatccagaaatcaagatccggatccttggggagcccaagcagaaacgcaagctggtggctgaggtgtccctgcagaacccgctccctgtggccctggaaggctgcaccttcactgtggagggggccggcctgactgaggagcagaagacggtggagatcccagaccccgtggaggcaggggaggaagttaaggtgagaatggacctgctgccgctccacatgggcctccacaagctggtggtgaacttcgagagcgacaagctgaaggctgtgaagggcttccggaatgtcatcattggccccgcctaagggacccctgctcccagcctgctgagagcccccaccttgatcccaatccttatcccaagctagtgagcaaaatatgccccttcttgggccccagaccccagggcagggtgggcagcctatgggggctctcggaaatggaatgtgcccctggcccatctcagcctcctgagcctgtgggtccccactcaccccctttgctgtgaggaatgctctgtgccagaaacagtgggagccctgaccttggctgactggggctggggtgagagaggaaagacctacattccctctcctgcccagatgccctttggaaagccattgaccacccaccatattgtttgatctacttcatagctccttggagcaggcaaaaaagggacagcatgccccttggctggatcagggaatccagctccctagactgcatcccgtacctcttcccatgactgcacccagctccaggggcccttgggacagccagagctgggtggggacagtgataggcccaaggggggcctccaacccatttaatcaccatgggaaactgttgtgggcgctgcttccaggataaggagactgaggcttagagagaggaggcagccccctccacaccagtccactccctgctccacgaagccttaagccataggcccaggatatttctgagagtgaaaccatgactgtgaccaccttctgtccccagccctgtcctggttccttcctatgcccaggtaccacccttcagaccccagttctaggggagaagagccctggacacccctgctctacccatgagcctgcccgctgcaatgcctagacttcccaacagccttagctgccagtgctggtcactaaccaacaaggttggcaccccagctaccccttctttgcagggctaaggcccccaaacatagcccctgccccggaggaagcttggggaacccatgagttgtcagctttgactttatctcctgctctttctacatgactgggcctcccttgggctggaagaattggggattctctattggaggtgagatcacagcctccagggccccccaaatcccagggaaggacttggagagaatcatgctgttgcatttagaactttctgctttgcacaggaaagagtcacacaattaatcaacatgtatattttctctatacatagagctctatttctctacggttttataaaagccttgggttccaaccaggcagtagatgtgcttctgaaccgcaaggagcaaacactgaaataaaatagtttatttttcacactcaaa

SEQ ID NO: 1247 - DNA, 3937 bp, Homo sapiens
ataagttagcgccgctctccgcctcggcagtgccagccgccagtggtcgcacttggagggtctcgccgccagtggaaggagccaccgcccccgcccgaccatggccgaggagctggtcttagagaggtgtgatctggagctggagaccaatggccgagaccaccacacggccgacctgtgccgggagaagctggtggtgcgacggggccagcccttctggctgaccctgcactttgagggccgcaactacgaggccagtgtagacagtctcaccttcagtgtcgtgaccggcccagcccctagccaggaggccgggaccaaggcccgttttccactaagagatgctgtggaggagggtgactggacagccaccgtggtggaccagcaagactgcaccctctcgctgcagctcaccaccccggccaacgcccccatcggcctgtatcgcctcagcctggaggcctccactggctaccagggatccagctttgtgctgggccacttcattttgctcttcaacgcctggtgcccagcggatgctgtgtacctggactcggaagaggagcggcaggagtatgtcctcacccagcagggctttatctaccagggctcggccaagttcatcaagaacataccttggaattttgggcagtttgaagatgggatcctagacatctgcctgatccttctagatgtcaaccccaagttcctgaagaacgccggccgtgactgctcccgccgcagcagccccgtctacgtgggccgggtggtgagtggcatggtcaactgcaacgatgaccagggtgtgctgctgggacgctgggacaacaactacggggacggcgtcagccccatgtcctggatcggcagcgtggacatcctgcggcgctggaagaaccacggctgccagcgcgtcaagtatggccagtgctgggtcttcgccgccgtggcctgcacagtgctgaggtgcctgggcatccctacccgcgtcgtgaccaactacaactcggcccatgaccagaacagcaaccttctcatcgagtacttccgcaatgagtttggggagatccagggtgacaagagcgagatgatctggaacttccactgctgggtggagtcgtggatgaccaggccggacctgcagccggggtacgagggctggcaggccctggacccaacgccccaggagaagagcgaagggacgtactgctgtggcccagttccagttcgtgccatcaaggagggcgacctgagcaccaagtacgatgcgccctttgtctttgcggaggtcaatgccgacgtggtagactggatccagcaggacgatgggtctgtgcacaaatccatcaaccgttccctgatcgttgggctgaagatcagcactaagagcgtgggccgagacgagcgggaggatatcacccacacctacaaatacccagaggggtcctcagaggagagggaggccttcacaagggcgaaccacctgaacaaactggccgagaaggaggagacagggatggccatgcggatccgtgtgggccagagcatgaacatgggcagtgactttgacgtctttgcccacatcaccaacaacaccgctgaggagtacgtctgccgcctcctgctctgtgcccgcaccgtcagctacaatgggatcttggggcccgagtgtggcaccaagtacctgctcaacctcaacctggagcctttctctgagaagagcgttcctctttgcatcctctatgagaaataccgtgactgccttacggagtccaacctcatcaaggtgcgggccctcctcgtggagccagttatcaacagctacctgctggctgagagggacctctacctggagaatccagaaatcaagatccggatccttggggagcccaagcagaaacgcaagctggtggctgaggtgtccctgcagaacccgctccctgtggccctggaaggctgcaccttcactgtggagggggccggcctgactgaggagcagaagacggtggagatcccagaccccgtggaggcaggggaggaagttaaggtgagaatggacctgctgccgctccacatgggcctccacaagctggtggtgaacttcgagagcgacaagctgaaggctgtgaagggcttccggaatgtcatcattggccccgcctaagggacccctgctcccagcctgctgagagcccccaccttgatcccaatccttatcccaagctagtgagcaaaatatgccccttcttgggccccagaccccagggcagggtgggcagcctatgggggctctcggaaatggaatgtgcccctggcccatctcagcctcctgagcctgtgggtccccactcaccccctttgctgtgaggaatgctctgtgccagaaacagtgggagccctgaccttggctgactggggctggggtgagagaggaaagacctacattccctctcctgcccagatgccctttggaaagccattgaccacccaccatattgtttgatctacttcatagctccttggagcaggcaaaaaagggacagcatgccccttggctggatcagggaatccagctccctagactgcatcccgtacctcttcccatgactgcacccagctccaggggcccttgggacagccagagctgggtggggacagtgataggcccaaggtcccctccacatcccagcagcccaagcttaatagccctccccctcaacctcaccattgtgaagcacctactatgtgctgggtgcctcccacacttgctggggctcacggggcctccaacccatttaatcaccatgggaaactgttgtgggcgctgcttccaggataaggagactgaggcttagagagaggaggcagccccctccacaccagtggcctcgtggttattagcaaggctgggtaatgtgaaggcccaagagcagagtctgggcctctgactctgagtccactgctccatttataaccccagcctgacctgagactgtcggagaggctgtctggggcctttatcaaaaaaagactcagccaagacaaggaggtagagaggggactgggggactgggagtcagagccctggctgggttcaggtcccacgtctggccaggcactgccttctcctctctgggcctttgtttccttgttggtcagaggagtgattgaaccagctcatctccaaggatcctctccactccatgtttgcaatgcttttatatggcccagccttgtaaataaccacaaggtccactccctgctccacgaagccttaagccataggcccaggatatttctgagagtgaaaccatgactgtgaccaccttctgtccccagccctgtcctggttccttcctatgcccaggtaccacccttcagaccccagttctaggggagaagagccctggacacccctgctctacccatgagcctgcccgctgcaatgcctagacttcccaacagccttagctgccagtgctggtcactaaccaacaaggttggcaccccagctaccccttctttgcagggctaaggcccccaaacatagcccctgccccggaggaagcttggggaacccatgagttgtcagctttgactttatctcctgctctttctacatgactgggcctcccttgggctggaagaattggggattctctattggaggtgagatcacagcctccagggccccccaaatcccagggaaggacttggagagaatcatgctgttgcatttagaactttctgctttgcacaggaaagagtcacacaattaatcaacatgtatattttctctatacatagagctctatttctctacggttttataaaagccttgggttccaaccaggcagtagatgtgcttctgaaccgcaaggagcaaacactgaaataaaatagtttatttttcacactcaaaaaaaaaaaaaaaaaa

SEQ ID NO: 1248 - DNA, 3983 bp, Homo sapiens
ggatccggaagcacaggagaccaagagaccagagataccaggatgagagataggacccctggttgccaggttcgagaagtcctaggctgagtccctggaaatggtcgcacttggagggtctcgccgccagtggaaggagccaccgcccccgcccgaccatggccgaggagctggtcttagagaggtgtgatctggagctggagaccaatggccgagaccaccacacggccgacctgtgccgggagaagctggtggtgcgacggggccagcccttctggctgaccctgcactttgagggccgcaactacgaggccagtgtagacagtctcaccttcagtgtcgtgaccggcccagcccctagccaggaggccgggaccaaggcccgttttccactaagagatgctgtggaggagggtgactggacagccaccgtggtggaccagcaagactgcaccctctcgctgcagctcaccaccccggccaacgcccccatcggcctgtatcgcctcagcctggaggcctccactggctaccagggatccagctttgtgctgggccacttcattttgctcttcaacgcctggtgcccagcggatgctgtgtacctggactcggaagaggagcggcaggagtatgtcctcacccagcagggctttatctaccagggctcggccaagttcatcaagaacataccttggaattttgggcagtttgaagatgggatcctagacatctgcctgatccttctagatgtcaaccccaagttcctgaagaacgccggccgtgactgctcccgccgcagcagccccgtctacgtgggccgggtggtgagtggcatggtcaactgcaacgatgaccagggtgtgctgctgggacgctgggacaacaactacggggacggcgtcagccccatgtcctggatcggcagcgtggacatcctgcggcgctggaagaaccacggctgccagcgcgtcaagtatggccagtgctgggtcttcgccgccgtggcctgcacagtgctgaggtgcctgggcatccctacccgcgtcgtgaccaactacaactcggcccatgaccagaacagcaaccttctcatcgagtacttccgcaatgagtttggggagatccagggtgacaagagcgagatgatctggaacttccactgctgggtggagtcgtggatgaccaggccggacctgcagccggggtacgagggctggcaggccctggacccaacgccccaggagaagagcgaagggacgtactgctgtggcccagttccagttcgtgccatcaaggagggcgacctgagcaccaagtacgatgcgccctttgtctttgcggaggtcaatgccgacgtggtagactggatccagcaggacgatgggtctgtgcacaaatccatcaaccgttccctgatcgttgggctgaagatcagcactaagagcgtgggccgagacgagcgggaggatatcacccacacctacaaatacccagaggggtcctcagaggagagggaggccttcacaagggcgaaccacctgaacaaactggccgagaaggaggagacagggatggccatgcggatccgtgtgggccagagcatgaacatgggcagtgactttgacgtctttgcccacatcaccaacaacaccgctgaggagtacgtctgccgcctcctgctctgtgcccgcaccgtcagctacaatgggatcttggggcccgagtgtggcaccaagtacctgctcaacctcaacctggagcctttctctgagaagagcgttcctctttgcatcctctatgagaaataccgtgactgccttacggagtccaacctcatcaaggtgcgggccctcctcgtggagccagttatcaacagctacctgctggctgagagggacctctacctggagaatccagaaatcaagatccggatccttggggagcccaagcagaaacgcaagctggtggctgaggtgtccctgcagaacccgctccctgtggccctggaaggctgcaccttcactgtggagggggccggcctgactgaggagcagaagacggtggagatcccagaccccgtggaggcaggggaggaagttaaggtgagaatggacctgctgccgctccacatgggcctccacaagctggtggtgaacttcgagagcgacaagctgaaggctgtgaagggcttccggaatgtcatcattggccccgcctaagggacccctgctcccagcctgctgagagcccccaccttgatcccaatccttatcccaagctagtgagcaaaatatgccccttcttgggccccagaccccagggcagggtgggcagcctatgggggctctcggaaatggaatgtgcccctggcccatctcagcctcctgagcctgtgggtccccactcaccccctttgctgtgaggaatgctctgtgccagaaacagtgggagccctgaccttggctgactggggctggggtgagagaggaaagacctacattccctctcctgcccagatgccctttggaaagccattgaccacccaccatattgtttgatctacttcatagctccttggagcaggcaaaaaagggacagcatgccccttggctggatcagggaatccagctccctagactgcatcccgtacctcttcccatgactgcacccagctccaggggcccttgggacagccagagctgggtggggacagtgataggcccaaggtcccctccacatcccagcagcccaagcttaatagccctccccctcaacctcaccattgtgaagcacctactatgtgctgggtgcctcccacacttgctggggctcacggggcctccaacccatttaatcaccatgggaaactgttgtgggcgctgcttccaggataaggagactgaggcttagagagaggaggcagccccctccacaccagtggcctcgtggttattagcaaggctgggtaatgtgaaggcccaagagcagagtctgggcctctgactctgagtccactgctccatttataaccccagcctgacctgagactgtcggagaggctgtctggggcctttatcaaaaaaagactcagccaagacaaggaggtagagaggggactgggggactgggagtcagagccctggctgggttcaggtcccacgtctggccaggcactgccttctcctctctgggcctttgtttccttgttggtcagaggagtgattgaaccagctcatctccaaggatcctctccactccatgtttgcaatgcttttatatggcccagccttgtaaataaccacaaggtccactccctgctccacgaagccttaagccataggcccaggatatttctgagagtgaaaccatgactgtgaccaccttctgtccccagccctgtcctggttccttcctatgcccaggtaccacccttcagaccccagttctaggggagaagagccctggacacccctgctctacccatgagcctgcccgctgcaatgcctagacttcccaacagccttagctgccagtgctggtcactaaccaacaaggttggcaccccagctaccccttctttgcagggctaaggcccccaaacatagcccctgccccggaggaagcttggggaacccatgagttgtcagctttgactttatctcctgctctttctacatgactgggcctcccttgggctggaagaattggggattctctattggaggtgagatcacagcctccagggccccccaaatcccagggaaggacttggagagaatcatgctgttgcatttagaactttctgctttgcacaggaaagagtcacacaattaatcaacatgtatattttctctatacatagagctctatttctctacggttttataaaagccttgggttccaaccaggcagtagatgtgcttctgaaccgcaaggagcaaacactgaaataaaatagtttatttttcacactcaaacta

SEQ ID NO: 1249 - DNA, 2217 bp, Homo sapiens
ggatccggaagcacaggagaccaagagaccagagataccaggatgagagataggacccctggttgccaggttcgagaagtcctaggctgagtccctggaaatggtcgcacttggagggtctcgccgccagtggaaggagccaccgcccccgcccgaccatggccgaggagctggtcttagagaggtgtgatctggagctggagaccaatggccgagaccaccacacggccgacctgtgccgggagaagctggtggtgcgacggggccagcccttctggctgaccctgcactttgagggccgcaactacgaggccagtgtagacagtctcaccttcagtgtcgtgaccggcccagcccctagccaggaggccgggaccaaggcccgttttccactaagagatgctgtggaggagggtgactggacagccaccgtggtggaccagcaagactgcaccctctcgctgcagctcaccaccccggccaacgcccccatcggcctgtatcgcctcagcctggaggcctccactggctaccagggatccagctttgtgctgggccacttcattttgctcttcaacgcctggtgcccagcggatgctgtgtacctggactcggaagaggagcggcaggagtatgtcctcacccagcagggctttatctaccagggctcggccaagttcatcaagaacataccttggaattttgggcagtttgaagatgggatcctagacatctgcctgatccttctagatgtcaaccccaagttcctgaagaacgccggccgtgactgctcccgccgcagcagccccgtctacgtgggccgggtggtgagtggcatggtcaactgcaacgatgaccagggtgtgctgctgggacgctgggacaacaactacggggacggcgtcagccccatgtcctggatcggcagcgtggacatcctgcggcgctggaagaaccacggctgccagcgcgtcaagtatggccagtgctgggtcttcgccgccgtggcctgcacagtgctgaggtgcctgggcatccctacccgcgtcgtgaccaactacaactcggcccatgaccagaacagcaaccttctcatcgagtacttccgcaatgagtttggggagatccagggtgacaagagcgagatgatctggaacttccactgctgggtggagtcgtggatgaccaggccggacctgcagccggggtacgagggctggcaggccctggacccaacgccccaggagaagagcgaagggacgtactgctgtggcccagttccagttcgtgccatcaaggagggcgacctgagcaccaagtacgatgcgccctttgtctttgcggaggtcaatgccgacgtggtagactggatccagcaggacgatgggtctgtgcacaaatccatcaaccgttccctgatcgttgggctgaagatcagcactaagagcgtgggccgagacgagcgggaggatatcacccacacctacaaatacccagaggggtcctcagaggagagggaggccttcacaagggcgaaccacctgaacaaactggccgagaaggaggagacagggatggccatgcggatccgtgtgggccagagcatgaacatgggcagtgactttgacgtctttgcccacatcaccaacaacaccgctgaggagtacgtctgccgcctcctgctctgtgcccgcaccgtcagctacaatgggatcttggggcccgagtgtggcaccaagtacctgctcaacctcaacctggagcctttctctggtaaagccctgtgttcctggagcatttgttgaccgccaactgacaacatgctaggtagtgacctaaccacttagcatgtgtgatttcaccccacagacacttacatggcgctgactctggggcaggccctgtcctaagcactttataaatatcaacccacttaattcttattgcaagatgaggctggtccaagtcccctgttggaacctccaatgccaagctcaagctgagatgcgttccctctaagcccccatactgtggttgagttacttgttattctttgatgataagatctggggaatttccgtgtgctggtggacaggaagccaggccctggatggctgaaaggaatccagttgcccccacccctgcctcctttctctgctgcttctttctcttctccttcctgcctccaccctttcatgctctctcctccctcatccc

SEQ ID NO: 1250 - DNA, 3882 bp, Homo sapiens
tggtcgcacttggagggtctcgccgccagtggaaggagccaccgcccccgcccgaccatggccgaggagctggtcttagagaggtgtgatctggagctggagaccaatggccgagaccaccacacggccgacctgtgccgggagaagctggtggtgcgacggggccagcccttctggctgaccctgcactttgagggccgcaactacgaggccagtgtagacagtctcaccttcagtgtcgtgaccggcccagcccctagccaggaggccgggaccaaggcccgttttccactaagagatgctgtggaggagggtgactggacagccaccgtggtggaccagcaagactgcaccctctcgctgcagctcaccaccccggccaacgcccccatcggcctgtatcgcctcagcctggaggcctccactggctaccagggatccagctttgtgctgggccacttcattttgctcttcaacgcctggtgcccagcggatgctgtgtacctggactcggaagaggagcggcaggagtatgtcctcacccagcagggctttatctaccagggctcggccaagttcatcaagaacataccttggaattttgggcagtttgaagatgggatcctagacatctgcctgatccttctagatgtcaaccccaagttcctgaagaacgccggccgtgactgctcccgccgcagcagccccgtctacgtgggccgggtggtgagtggcatggtcaactgcaacgatgaccagggtgtgctgctgggacgctgggacaacaactacggggacggcgtcagccccatgtcctggatcggcagcgtggacatcctgcggcgctggaagaaccacggctgccagcgcgtcaagtatggccagtgctgggtcttcgccgccgtggcctgcacagtgctgaggtgcctgggcatccctacccgcgtcgtgaccaactacaactcggcccatgaccagaacagcaaccttctcatcgagtacttccgcaatgagtttggggagatccagggtgacaagagcgagatgatctggaacttccactgctgggtggagtcgtggatgaccaggccggacctgcagccggggtacgagggctggcaggccctggacccaacgccccaggagaagagcgaagggacgtactgctgtggcccagttccagttcgtgccatcaaggagggcgacctgagcaccaagtacgatgcgccctttgtctttgcggaggtcaatgccgacgtggtagactggatccagcaggacgatgggtctgtgcacaaatccatcaaccgttccctgatcgttgggctgaagatcagcactaagagcgtgggccgagacgagcgggaggatatcacccacacctacaaatacccagaggggtcctcagaggagagggaggccttcacaagggcgaaccacctgaacaaactggccgagaaggaggagacagggatggccatgcggatccgtgtgggccagagcatgaacatgggcagtgactttgacgtctttgcccacatcaccaacaacaccgctgaggagtacgtctgccgcctcctgctctgtgcccgcaccgtcagctacaatgggatcttggggcccgagtgtggcaccaagtacctgctcaacctcaacctggagcctttctctgagaagagcgttcctctttgcatcctctatgagaaataccgtgactgccttacggagtccaacctcatcaaggtgcgggccctcctcgtggagccagttatcaacagctacctgctggctgagagggacctctacctggagaatccagaaatcaagatccggatccttggggagcccaagcagaaacgcaagctggtggctgaggtgtccctgcagaacccgctccctgtggccctggaaggctgcaccttcactgtggagggggccggcctgactgaggagcagaagacggtggagatcccagaccccgtggaggcaggggaggaagttaaggtgagaatggacctgctgccgctccacatgggcctccacaagctggtggtgaacttcgagagcgacaagctgaaggctgtgaagggcttccggaatgtcatcattggccccgcctaagggacccctgctcccagcctgctgagagcccccaccttgatcccaatccttatcccaagctagtgagcaaaatatgccccttcttgggccccagaccccagggcagggtgggcagcctatgggggctctcggaaatggaatgtgcccctggcccatctcagcctcctgagcctgtgggtccccactcaccccctttgctgtgaggaatgctctgtgccagaaacagtgggagccctgaccttggctgactggggctggggtgagagaggaaagacctacattccctctcctgcccagatgccctttggaaagccattgaccacccaccatattgtttgatctacttcatagctccttggagcaggcaaaaaagggacagcatgccccttggctggatcagggaatccagctccctagactgcatcccgtacctcttcccatgactgcacccagctccaggggcccttgggacagccagagctgggtggggacagtgataggcccaaggtcccctccacatcccagcagcccaagcttaatagccctccccctcaacctcaccattgtgaagcacctactatgtgctgggtgcctcccacacttgctggggctcacggggcctccaacccatttaatcaccatgggaaactgttgtgggcgctgcttccaggataaggagactgaggcttagagagaggaggcagccccctccacaccagtggcctcgtggttattagcaaggctgggtaatgtgaaggcccaagagcagagtctgggcctctgactctgagtccactgctccatttataaccccagcctgacctgagactgtcggagaggctgtctggggcctttatcaaaaaaagactcagccaagacaaggaggtagagaggggactgggggactgggagtcagagccctggctgggttcaggtcccacgtctggccaggcactgccttctcctctctgggcctttgtttccttgttggtcagaggagtgattgaaccagctcatctccaaggatcctctccactccatgtttgcaatgcttttatatggcccagccttgtaaataaccacaaggtccactccctgctccacgaagccttaagccataggcccaggatatttctgagagtgaaaccatgactgtgaccaccttctgtccccagccctgtcctggttccttcctatgcccaggtaccacccttcagaccccagttctaggggagaagagccctggacacccctgctctacccatgagcctgcccgctgcaatgcctagacttcccaacagccttagctgccagtgctggtcactaaccaacaaggttggcaccccagctaccccttctttgcagggctaaggcccccaaacatagcccctgccccggaggaagcttggggaacccatgagttgtcagctttgactttatctcctgctctttctacatgactgggcctcccttgggctggaagaattggggattctctattggaggtgagatcacagcctccagggccccccaaatcccagggaaggacttggagagaatcatgctgttgcatttagaactttctgctttgcacaggaaagagtcacacaattaatcaacatgtatattttctctatacatagagctctatttctctacggttttataaaagccttgggttccaaccaggcagtagatgtgcttctgaaccgcaaggagcaaacactgaaataaaatagtttatttttcacactcaaacta

SEQ ID NO: 1251 - DNA, 3613 bp, Homo sapiens
ggatccggaagcacaggagaccaagagaccagagataccaggatgagagataggacccctggttgccaggttcgagaagtcctaggctgagtccctggaaatggtcgcacttggagggtctcgccgccagtggaaggagccaccgcccccgcccgaccatggccgaggagctggtcttagagaggtgtgatctggagctggagaccaatggccgagaccaccacacggccgacctgtgccgggagaagctggtggtgcgacggggccagcccttctggctgaccctgcactttgagggccgcaactacgaggccagtgtagacagtctcaccttcagtgtcgtgaccggcccagcccctagccaggaggccgggaccaaggcccgttttccactaagagatgctgtggaggagggtgactggacagccaccgtggtggaccagcaagactgcaccctctcgctgcagctcaccaccccggccaacgcccccatcggcctgtatcgcctcagcctggaggcctccactggctaccagggatccagctttgtgctgggccacttcattttgctcttcaacgcctggtgcccagcggatgctgtgtacctggactcggaagaggagcggcaggagtatgtcctcacccagcagggctttatctaccagggctcggccaagttcatcaagaacataccttggaattttgggcagtttgaagatgggatcctagacatctgcctgatccttctagatgtcaaccccaagttcctgaagaacgccggccgtgactgctcccgccgcagcagccccgtctacgtgggccgggtggtgagtggcatggtcaactgcaacgatgaccagggtgtgctgctgggacgctgggacaacaactacggggacggcgtcagccccatgtcctggatcggcagcgtggacatcctgcggcgctggaagaaccacggctgccagcgcgtcaagtatggccagtgctgggtcttcgccgccgtggcctgcacagtgctgaggtgcctgggcatccctacccgcgtcgtgaccaactacaactcggcccatgaccagaacagcaaccttctcatcgagtacttccgcaatgagtttggggagatccagggtgacaagagcgagatgatctggaacttccactgctgggtggagtcgtggatgaccaggccggacctgcagccggggtacgagggctggcaggccctggacccaacgccccaggagaagagcgaagggacgtactgctgtggcccagttccagttcgtgccatcaaggagggcgacctgagcaccaagtacgatgcgccctttgtctttgcggaggtcaatgccgacgtggtagactggatccagcaggacgatgggtctgtgcacaaatccatcaaccgttccctgatcgttgggctgaagatcagcactaagagcgtgggccgagacgagcgggaggatatcacccacacctacaaatacccagaggggtcctcagaggagagggaggccttcacaagggcgaaccacctgaacaaactggccgagaaggaggagacagggatggccatgcggatccgtgtgggccagagcatgaacatgggcagtgactttgacgtctttgcccacatcaccaacaacaccgctgaggagtacgtctgccgcctcctgctctgtgcccgcaccgtcagctacaatgggatcttggggcccgagtgtggcaccaagtacctgctcaacctcaacctggagcctttctctgagaagagcgttcctctttgcatcctctatgagaaataccgtgactgccttacggagtccaacctcatcaaggtgcgggccctcctcgtggagccagttatcaacagctacctgctggctgagagggacctctacctggagaatccagaaatcaagatccggatccttggggagcccaagcagaaacgcaagctggtggctgaggtgtccctgcagaacccgctccctgtggccctggaaggctgcaccttcactgtggagggggccggcctgactgaggagcagaagacggtggagatcccagaccccgtggaggcaggggaggaagttaaggtgagaatggacctgctgccgctccacatgggcctccacaagctggtggtgaacttcgagagcgacaagctgaaggctgtgaagggcttccggaatgtcatcattggccccgcctaagggacccctgctcccagcctgctgagagcccccaccttgatcccaatccttatcccaagctagtgagcaaaatatgccccttcttgggccccagaccccagggcagggtgggcagcctatgggggctctcggaaatggaatgtgcccctggcccatctcagcctcctgagcctgtgggtccccactcaccccctttgctgtgaggaatgctctgtgccagaaacagtgggagccctgaccttggctgactggggctggggtgagagaggaaagacctacattccctctcctgcccagatgccctttggaaagccattgaccacccaccatattgtttgatctacttcatagctccttggagcaggcaaaaaagggacagcatgccccttggctggatcagggaatccagctccctagactgcatcccgtacctcttcccatgactgcacccagctccaggggcccttgggacagccagagctgggtggggacagtgataggcccaaggtcccctccacatcccagcagcccaagcttaatagccctccccctcaacctcaccattgtgaagcacctactatgtgctgggtgcctcccacacttgctggggctcacggggcctccaacccatttaatcaccatgggaaactgttgtgggcgctgcttccaggataaggagactgaggcttagagagaggaggcagccccctccacaccagtggcctcgtggttattagcaaggctgggtaatgtgaaggcccaagagcagagtctgggcctctgactctgagtccactgctccatttataaccccagcctgacctgagactgtcggagaggctgtctggggcctttatcaaaaaaagactcagccaagacaaggaggtagagaggggactgggggactgggagtcagagccctggctgggttcaggtcccacgtctggccaggcactgccttctcctctctgggcctttgtttccttgttggtcagaggagtgattgaaccagctcatctccaaggatcctctccactccatgtttgcaatgcttttatatggcccagccttgtaaataaccacaaggtccactccctgctccacgaagccttaagccataggcccaggatatttctgagaatcacagcctccagggccccccaaatcccagggaaggacttggagagaatcatgctgttgcatttagaactttctgctttgcacaggaaagagtcacacaattaatcaacatgtatattttctctatacatagagctctatttctctacggttttataaaagccttgggttccaaccaggcagtagatgtgcttctgaaccgcaaggagcaaacactgaaataaaatagtttatttttcacactcaaacta

SEQ ID NO: 1252 - DNA, 6794 bp, Homo sapiens
cggccgcgcaggcgcaaaatgtcgcagccgtagggaggctccgcctctgacgcttgccttgcatcacgtggtaatggccgctcaaaaaacgccttagcgaaaaccagagcgtgccctcgtcacgtgatggaggactcccagtacggcaaagggaaggcgccaaaagttgtcagatggcgaaggaaaccgcgaaattcgccattgtcacatgatggagcaacctatcgaaagcggagggaaaggtgccgaagtcacgtgactacgcacgcaaacactcccgcttgcaccacgtgcaactcacgcccaccccctcagccccccccttatctcttttcgcccctccctcccatttgggttgggcctgcgtcgaggcgcaacgcggcgtcaaagggggcggggcttcagccggtcacgtgttcccgcacctccccggcgcgcgcctgcccgcccgcccgctcgcccccggtccggactcctcctcctcctcttctcgccattgcagttggacccagcagcccggcgcgcaccgcgtggcttttgggggcagaccccggcgggctgtggcaggagggcggcggcggcggctgcggtcgaagaaggggacgccgacaagagttgaagtattgataacaccaaggaactctatcacaatttgaaaagataagcaaaagtttgatttccagacactacagaagaagtaaaaatgcgtccaatgcgaatttttgtgaatgatgaccgccatgtgatggcaaagcattcttccgtttatccaacacaagaggagctggaggcagtccagaacatggtgtcccacacggagcgggcgctcaaagctgtgtccgactggatagacgagcaggaaaagggtagcagcgagcaggcagagtccgataacatggatgtgcccccagaggacgacagtaaagaaggggctggggaacagaagacggagcacatgaccagaaccctgcggggagtgatgcgggtgggcctggtggcaaagggcctcctactcaagggggacttggatctggagctggtgctgctgtgtaaggagaagcccacaaccgccctcctggacaaggtggccgacaacctggccatccagcttgctgctgtaacagaagacaagtacgaaatactgcaatctgtcgacgatgctgcgattgtgataaaaaacacaaaagagcctccattgtccctgaccatccacctgacatcccctgttgtcagagaagaaatggagaaagtattagctggagaaacgctatcagtcaacgaccccccggacgttctggacaggcagaaatgccttgctgccttggcgtccctccgacacgccaagtggttccaggccagagccaacgggctgaagtcttgtgtcattgtgatccgggtcttgagggacctgtgcactcgcgtgcccacctggggtcccctccgaggctggcctctcgagctcctgtgtgagaaatccattggcacggccaacagaccgatgggtgctggcgaggccctgcggagagtgctggagtgcctggcgtcgggcatcgtgatgccagatggttctggcatttatgacccttgtgaaaaagaagccactgatgctattgggcatctagacagacagcaacgggaagatatcacacagagtgcgcagcacgcactgcggctcgctgccttcggccagctccataaagtcctaggcatggaccctctgccttccaagatgcccaagaaaccaaagaatgaaaacccagtggactacaccgttcagatcccaccaagcaccacctatgccattacgcccatgaaacgcccaatggaggaggacggggaggagaagtcgcccagcaaaaagaagaagaagattcagaagaaagaggagaaggcagagcccccccaggctatgaatgccctgatgcggttgaaccagctgaagccagggctgcagtacaagctggtgtcccagactgggcccgtccatgcccccatctttaccatgtctgtggaggttgatggcaattcattcgaggcctctgggccctccaaaaagacggccaagctgcacgtggccgttaaggtgttacaggacatgggcttgccgacgggtgctgaaggcagggactcgagcaagggggaggactcggctgaggagaccgaggcgaagccagcagtggtggcccctgccccagtggtagaagctgtctccacccctagtgcggcctttccctcagatgccactgccgagaacgtaaaacagcaggggccgatcctgacaaagcacggcaagaacccagtcatggagctgaacgagaagaggcgtgggctcaagtacgagctcatctccgagaccgggggcagccacgacaagcgcttcgtcatggaggtcgaagtggatggacagaagttccaaggtgctggttccaacaaaaaggtggcgaaggcctacgctgctcttgctgccctagaaaagcttttccctgacacccctctcgcccttgatgccaacaaaaagaagagagccccagtacccgtcagagggggaccgaaatttgctgctaagccacataaccctggcttcggcatgggaggccccatgcacaacgaagtgcccccaccccccaaccttcgagggcggggaagaggcgggagcatccggggacgagggcgcgggcgaggatttggtggcgccaaccatggaggctacatgaatgccggtgctgggtatggaagctatgggtacggaggcaactcggcgacagcaggtcagttctacagcaacggagggcattctgggaatgccagtggcggtggcggcgggggcggtggtggctcctccggctatggctcctactaccaaggtgacaactacaactcaccggtgcccccaaaacacgctgggaagaagcagccgcacgggggccagcagaagccctcctacggctcgggctaccagtcccaccagggccagcagcagtcctacaaccagagcccctacagcaactatggccctccacagggcaagcagaaaggctataaccatggacaaggcagctactcctactcgaactcctacaactctcccgggggcgggggcggatccgactacaactacgagagcaaattcagtgagttggcttccagagcccctcggccgggccagggtccaggccccagcagtgcagcccacggagtggcagaagctcggcactgcccagacctctggctgagggccttaggaggaggacaagtggtgctggctgcgggcgggtgctaggaagatggggcgtgggacctcatggtgccgtctccgccactctctctggtgtgttctccgaaggcagggtagctgaggcctctgtcccgaggccctggctgtgggtgaggctgcaaggtgacttcctgggacttgctctagagagttttgcatccagcccctgcaagagcctgacctctccgccaccgcctttccgcttcctcatgcgcagacccagcaggcccgggctgcaccagtgacccagtggggctgagtagactacagtggtagtggaggccgaagcggcgggaacagctacggctcaggcggggcatcctacaacccagggtcacacgggggctacggcggaggttctgggggcggctcctcataccaaggcaaacaaggaggctactcacagtcgaactacaactccccggggtccggccagaactacagtggccctcccagctcctaccagtcctcacaaggcggctatggcagaaacgcagaccacagcatgaactaccagtacagataagcccccgcggggcggagatttctaccttctgcacttactccccatcagaagatcgagttttatgcatcacatccacgttgctgtgtcgtgaggtgcagcgggtcaccctgtggcccgtcctgtgacccatatttagccgtgtttgggactccgtgtcttcaatggtttgttagttgccattacaactttgtctgggtagagtttttgagtttttgcagttcagtatccctctgtctattcacacttcgtgttagtggtaactcagtttgtctttaaatagttacagaagggatacgtcatttgttaatgcttttgtgaagtgagttaaacgagctttctgtattttaatgctttagtgtttcagttttataagtgaagattttattttaaaaaccagtgggaaagagtggggggtttctttttatgtctgggtcattcaggcagtacatctgaattaagctgaatgtagacaaataaagaaaaacaaaactgcgcccgtcttaggcctgggtgtctgacccaccagcagtgcaatgggcaggtttccccactctattcctgctcttgggaaagcagcgtgggccatcaggatggtccctggtccttagagagggtccagttcaggcttctagacattttactcatgctcagcgaaggctggttcctggtcccctgggctgtgtagacccggtgtcccaccaggctccaggctcccaccatctacagaggggcttacagcgcccattctggtcttggggaacccatcacaaaataggctttttctgctccccgattctggtgtagttctaagtacacagtgatgtcctctgtaggggcgtgcctgtggtggaacataacgcagttacaaaagaaagggcaggtgaggcctgggtaaccccagccatggaccgtcagtggctggagggagcttcgtgtctgtgctggagctgcagcctgctcgccatctggaggctcagtggagtggggagttggggttctcataccagcagatttccctagagcgtgattctcccatctgaggcaatcttgcctcccaggggaaattttgcaatgtttggaggatgttgtcacagctagtagcgggtgctctgggatctggtggatagatgccaaggatgctgtcaagcatactgtactgcccagaacagtggcccatagcagggacctgccctatcaaaatatcaggtgtatggaggtggagtcccaacgctagagcagcccttctcagctccaccctgcccggggagggaggaggagctctggtttcagagcagtgccgggattgcctttccccaggatctgtgtcggccatccaggaagaactgtactggccaagcctgggaccacacgtctgcagagatcctgctctgctggcctgagccccaggccttggcctcctgtgcttgggtaaccatggccactgggaaaagcaaggaccgtgtttgactttcttggagaggtgaaagaggtgaaagaacaagttgtgtgctagaaaacttttgaggaattcttatttgtgttagagcagaggaggtcccagataccaagtggcgcctcccaggaaaggctgggagaagaggtggcctggagtaccccgagatcccagcagcgcacacagtggagggatgaggatggatgggtcctaacccctgattttgatgggatgtgttcatgtcctatctcctctcctggacacattaaggggttgggacaagaagagactcctgtgagatcagcagacctcgtgtttaaggagagaatgcctgcctgcaacactcatggagagggacacttcctggccccacctgctaaatacctccaaactctgggcaggcgcctgcattctcaacacaggacttcccttaacagtttccggatcagtgaccaccaccacgttcaggtttctgaatgcatgcggcacagcaggcacgtgcctggagagaacagctcctgagcacagcacccttggagccctcaccccgctcacgatcctcaccagtgctgatgatgccgtcatgctgctggcctgagacagtatcccagctacaacaggacgacaccgggttcaggaatatgtggctatcaccttgagcactgacagtggccttccaggctagttgccttccaaacgcaggtagccgacctgcaggagggcctacaaacgggcccagcaagagctgggcaacagctggcttgtgaaatgagacaccttgaccaatatgctttgggtggacggtctcctacatgttcagtggaggccaccaggagcatccatgagcggggaaggggtccacacccttacatggcaagttgatacgatggggtgcttggtggatgggccatggaggtccgtgagctggaactgggcacacgccatcccagagggctcaggatgccccaggaaggaaagaagggcaacagactacacgattggacgtgtgtggttgactgggatgaagttggagggaggggcagggccttgcaggggattggtactgatcccagggaggaagtgttggggcttcatgaactaggatgaaaggaggcccctgagccatgacaaggggcacatccaggatttccgccaccctgaatttagtagagctagtaggccctggtcgtcactctgggcagggatgccgtcagccttgagggtcgccacccacctgtgtgttgccctctgtcctggcggggaaacatacaccccttgtctcaccaccaaccttgcttgtgtagtcagcagggctggccctgccccaaggactcactgcatgtacccggacccctaggcctggcctttgcagcatagttgggagcttctggattccatctgcacctgtgagccccatgctggctgtgcactgcgcgggcctgagactgctggatacaatgttgggcaacaactcagccagcctgatggcagcctcagaggcttactctaacccatcccagaataaatggagacttcatgtg

SEQ ID NO: 1253 - DNA, 6058 bp, Homo sapiens
cgcctgcccgcccgcccgctcgcccccggtccggactcctcctcctcctcttctcgccattgcagttggacccagcagcccggcgcgcaccgcgtggcttttgggggcagaccccggcgggctgtggcaggagggcggcggcggcggctgcggtcgaagaaggggacgccgacaagagttgaagtattgataacaccaaggaactctatcacaatttgaaaagataagcaaaagtttgatttccagacactacagaagaagtaaaaatgcgtccaatgcgaatttttgtgaatgatgaccgccatgtgatggcaaagcattcttccgtttatccaacacaagaggagctggaggcagtccagaacatggtgtcccacacggagcgggcgctcaaagctgtgtccgactggatagacgagcaggaaaagggtagcagcgagcaggcagagtccgataacatggatgtgcccccagaggacgacagtaaagaaggggctggggaacagaagacggagcacatgaccagaaccctgcggggagtgatgcgggtgggcctggtggcaaagggcctcctactcaagggggacttggatctggagctggtgctgctgtgtaaggagaagcccacaaccgccctcctggacaaggtggccgacaacctggccatccagcttgctgctgtaacagaagacaagtacgaaatactgcaatctgtcgacgatgctgcgattgtgataaaaaacacaaaagagcctccattgtccctgaccatccacctgacatcccctgttgtcagagaagaaatggagaaagtattagctggagaaacgctatcagtcaacgaccccccggacgttctggacaggcagaaatgccttgctgccttggcgtccctccgacacgccaagtggttccaggccagagccaacgggctgaagtcttgtgtcattgtgatccgggtcttgagggacctgtgcactcgcgtgcccacctggggtcccctccgaggctggcctctcgagctcctgtgtgagaaatccattggcacggccaacagaccgatgggtgctggcgaggccctgcggagagtgctggagtgcctggcgtcgggcatcgtgatgccagatggttctggcatttatgacccttgtgaaaaagaagccactgatgctattgggcatctagacagacagcaacgggaagatatcacacagagtgcgcagcacgcactgcggctcgctgccttcggccagctccataaagtcctaggcatggaccctctgccttccaagatgcccaagaaaccaaagaatgaaaacccagtggactacaccgttcagatcccaccaagcaccacctatgccattacgcccatgaaacgcccaatggaggaggacggggaggagaagtcgcccagcaaaaagaagaagaagattcagaagaaagaggagaaggcagagcccccccaggctatgaatgccctgatgcggttgaaccagctgaagccagggctgcagtacaagctggtgtcccagactgggcccgtccatgcccccatctttaccatgtctgtggaggttgatggcaattcattcgaggcctctgggccctccaaaaagacggccaagctgcacgtggccgttaaggtgttacaggacatgggcttgccgacgggtgctgaaggcagggactcgagcaagggggaggactcggctgaggagaccgaggcgaagccagcagtggtggcccctgccccagtggtagaagctgtctccacccctagtgcggcctttccctcagatgccactgccgagcaggggccgatcctgacaaagcacggcaagaacccagtcatggagctgaacgagaagaggcgtgggctcaagtacgagctcatctccgagaccgggggcagccacgacaagcgcttcgtcatggaggtcgaagtggatggacagaagttccaaggtgctggttccaacaaaaaggtggcgaaggcctacgctgctcttgctgccctagaaaagcttttccctgacacccctctcgcccttgatgccaacaaaaagaagagagccccagtacccgtcagagggggaccgaaatttgctgctaagccacataaccctggcttcggcatgggaggccccatgcacaacgaagtgcccccaccccccaaccttcgagggcggggaagaggcgggagcatccggggacgagggcgcgggcgaggatttggtggcgccaaccatggaggctacatgaatgccggtgctgggtatggaagctatgggtacggaggcaactcggcgacagcaggctacagtcagttctacagcaacggagggcattctgggaatgccagtggcggtggcggcgggggcggtggtggctcctccggctatggctcctactaccaaggtgacaactacaactcaccggtgcccccaaaacacgctgggaagaagcagccgcacgggggccagcagaagccctcctacggctcgggctaccagtcccaccagggccagcagcagtcctacaaccagagcccctacagcaactatggccctccacagggcaagcagaaaggctataaccatggacaaggcagctactcctactcgaactcctacaactctcccgggggcgggggcggatccgactacaactacgagagcaaattcaactacagtggtagtggaggccgaagcggcgggaacagctacggctcaggcggggcatcctacaacccagggtcacacgggggctacggcggaggttctgggggcggctcctcataccaaggcaaacaaggaggctactcacagtcgaactacaactccccggggtccggccagaactacagtggccctcccagctcctaccagtcctcacaaggcggctatggcagaaacgcagaccacagcatgaactaccagtacagataagcccccgcggggcggagatttctaccttctgcacttactccccatcagaagatcgagttttatgcatcacagttaacatgtcagctggccctccaggcccccgcccccatcccgtccacgttgctgtgtcgtgaggtgcagcgggtcaccctgtggcccgtcctgtgacccatatttagccgtgtttgggactccgtgtcttcaatggtttgttagttgccattacaactttgtctgggtagagtttttgagtttttgcagttcagtatccctctgtctattcacacttcgtgttagtggtaactcagtttgtctttaaatagttacagaagggatacgtcatttgttaatgcttttgtgaagtgagttaaacgagctttctgtattttaatgctttagtgtttcagttttataagtgaagattttattttaaaaaccagtgggaaagagtggggggtttctttttatgtctgggtcattcaggcagtacatctgaattaagctgaatgtagacaaataaagaaaaacaaaactgcgcccgtcttaggcctgggtgtctgacccaccagcagtgcaatgggcaggtttccccactctattcctgctcttgggaaagcagcgtgggccatcaggatggtccctggtccttagagagggtccagttcaggcttctagacattttactcatgctcagcgaaggctggttcctggtcccctgggctgtgtagacccggtgtcccaccaggctccaggctcccaccatctacagaggggcttacagcgcccattctggtcttggggaacccatcacaaaataggctttttctgctccccgattctggtgtagttctaagtacacagtgatgtcctctgtaggggcgtgcctgtggtggaacataacgcagttacaaaagaaagggcaggtgaggcctgggtaaccccagccatggaccgtcagtggctggagggagcttcgtgtctgtgctggagctgcagcctgctcgccatctggaggctcagtggagtggggagttggggttctcataccagcagatttccctagagcgtgattctcccatctgaggcaatcttgcctcccaggggaaattttgcaatgtttggaggatgttgtcacagctagtagcgggtgctctgggatctggtggatagatgccaaggatgctgtcaagcatactgtactgcccagaacagtggcccatagcagggacctgccctatcaaaatatcaggtgtatggaggtggagtcccaacgctagagcagcccttctcagctccaccctgcccggggagggaggaggagctctggtttcagagcagtgccgggattgcctttccccaggatctgtgtcggccatccaggaagaactgtactggccaagcctgggaccacacgtctgcagagatcctgctctgctggcctgagccccaggccttggcctcctgtgcttgggtaaccatggccactgggaaaagcaaggaccgtgtttgactttcttggagaggtgaaagaggtgaaagaacaagttgtgtgctagaaaacttttgaggaattcttatttgtgttagagcagaggaggtcccagataccaagtggcgcctcccaggaaaggctgggagaagaggtggcctggagtaccccgagatcccagcagcgcacacagtggagggatgaggatggatgggtcctaacccctgattttgatgggatgtgttcatgtcctatctcctctcctggacacattaaggggttgggacaagaagagactcctgtgagatcagcagacctcgtgtttaaggagagaatgcctgcctgcaacactcatggagagggacacttcctggccccacctgctaaatacctccaaactctgggcaggcgcctgcattctcaacacaggacttcccttaacagtttccggatcagtgaccaccaccacgttcaggtttctgaatgcagacccaccacgagggatggattccacccgcccgccctgctgcagatacatgcggcacagcaggcacgtgcctggagagaacagctcctgagcacagcacccttggagccctcaccccgctcacgatcctcaccagtgctgatgatgccgtcatgctgctggcctgagacagtatcccagctacaacaggacgacaccgggttcaggaatatgtggctatcaccttgagcactgacagtggccttccaggctagttgccttccaaacgcaggtagccgacctgcaggagggcctacaaacgggcccagcaagagctgggcaacagctggcttgtgaaatgagacaccttgaccaatatgctttgggtggacggtctcctacatgttcagtggaggccaccaggagcatccatgagcggggaaggggtccacacccttacatggcaagttgatacgatggggtgcttggtggatgggccatggaggtccgtgagctggaactgggcacacgccatcccagagggctcaggatgccccaggaaggaaagaagggcaacagactacacgattggacgtgtgtggttgactgggatgaagttggagggaggggcagggccttgcaggggattggtactgatcccagggaggaagtgttggggcttcatgaactaggatgaaaggaggcccctgagccatgacaaggggcacatccaggatttccgccaccctgaatttagtagagctagtaggccctggtcgtcactctgggcagggatgccgtcagccttgagggtcgccacccacctgtgtgttgccctctgtcctggcagggaaacatacaccccttgtctcaccaccaaccttgcttgtgtagtcagcagggctggccctgccccaaggactcactgcatgtacccggacccctaggcctggcctttgcagcatagttgggagcttctggattccatctgcacctgtgagccccatgctggctgtgcactgcgcgggcctgagactgctggatacaatgttgggcaacaactcagccagcctgatggcagcctcagaggcttactctaacccatcccagaataaatggagacttcatgtgttcattgtttcattcactcaa

SEQ ID NO: 1254 - DNA, 3242 bp, Homo sapiens
atgcgtccaatgcgaatttttgtgaatgatgaccgccatgtgatggcaaagcattcttccgtttatccaacacaagaggagctggaggcagtccagaacatggtgtcccacacggagcgggcgctcaaagctgtgtccgactggatagacgagcaggaaaagggtagcagcgagcaggcagagtccgataacatggatgtgcccccagaggacgacagtaaagaaggggctggggaacagaagacggagcacatgaccagaaccctgcggggagtgatgcgggtgggcctggtggcaaagtgcctcctactcaagggggacttggatctggagctggtgctgctgtgtaaggagaagcccacaaccgccctcctggacaaggtggccgacaacctggccatccagcttgctgctgtaacagaagacaagtacgaaatactgcaatctgtcgacgatgctgcgattgtgataaaaaacacaaaagagcctccattgtccctgaccatccacctgacatcccctgttgtcagagaagaaatggagaaagtattagctggagaaacgctatcagtcaacgaccccccggacgttctggacaggcagaaatgccttgctgccttggcgtccctccgacacgccaagtggttccaggccagagccaacgggctgaagtcttgtgtcattgtgatccgggtcttgagggacctgtgcactcgcgtgcccacctggggtcccctccgaggctggcctctcgagctcctgtgtgagaaatccattggcacggccaacagaccgatgggtgctggcgaggccctgcggagagtgctggagtgcctggcgtcgggcatcgtgatgccagatggttctggcatttatgacccttgtgaaaaagaagccactgatgctattgggcatctagacagacagcaacgggaagatatcacacagagtgcgcagcacgcactgcggctcgctgccttcggccagctccataaagtcctaggcatggaccctctgccttccaagatgcccaagaaaccaaagaatgaaaacccagtggactacaccgttcagatcccaccaagcaccacctatgccattacgcccatgaaacgcccaatggaggaggacggggaggagaagtcgcccagcaaaaagaagaagaagattcagaagaaagaggagaaggcagagcccccccaggctatgaatgccctgatgcggttgaaccagctgaagccagggctgcagtacaagctggtgtcccagactgggcccgtccatgcccccatctttaccatgtctgtggaggttgatggcaattcattcgaggcctctgggccctccaaaaagacggccaagctgcacgtggccgttaaggtgttacaggacatgggcttgccgacgggtgctgaaggcagggactcgagcaagggggaggactcggctgaggagaccgaggcgaagccagcagtggtggcccctgccccagtggtagaagctgtctccacccctagtgcggcctttccctcagatgccactgccgagcaggggccgatcctgacaaagcacggcaagaacccagtcatggagctgaacgagaagaggcgtgggctcaagtacgagctcatctccgagaccgggggcagccacgacaagcgcttcgtcatggaggtcgaagtggatggacagaagttccaaggtgctggttccaacaaaaaggtggcgaaggcctacgctgctcttgctgccctagaaaagcttttccctgacacccctctcgcccttgatgccaacaaaaagaagagagccccagtacccgtcagagggggaccgaaatttgctgctaagccacataaccctggcttcggcatgggaggccccatgcacaacgaagtgcccccaccccccaaccttcgagggcggggaagaggcgggagcatccggggacgagggcgcgggcgaggatttggtggcgccaaccatggaggctacatgaatgccggtgctgggtatggaagctatgggtacggaggcaactctgcgacagcaggctacagtcagttctacagcaacggagggcattctgggaatgccagtggcggtggcggcgggggcggtggtggctcctccggctatggctcctactaccaaggtgacaactacaactcaccggtgcccccaaaacacgctgggaagaagcagccgcacgggggccagcagaagccctcctacggctcgggctaccagtcccaccagggccagcagcagtcctacaaccagagcccctacagcaactatggccctccacagggcaagcagaaaggctataaccatggacaaggcagctactcctactcgaactcctacaactctcccgggggcgggggcggatccgactacaactacgagagcaaattcaactacagtggtagtggaggccgaagcggcgggaacagctacggctcaggcggggcatcctacaacccagggtcacacgggggctacggcggaggttctgggggcggctcctcataccaaggcaaacaaggaggctactcacagtcgaactacaactccccggggtccggccagaactacagtggccctcccagctcctaccagtcctcacaaggcggctatggcagaaacgcagaccacagcatgaactaccagtacagataagcccccgcggggcggagatttctaccttctgcacttactccccatcagaagatcgagttttatgcatcacagttaacatgtcagctggccctccaggcccccgcccccatcccgtccacgttgctgtgtcgtgaggtgcagcgggtcaccctgtggcccgtcctgtgacccatatttagccgtgtttgggactccgtgtcttcaatggtttgttagttgccattacaactttgtctgggtagagtttttgagtttttgcagttcagtatccctctgtctattcacacttcgtgttagtggtaactcagtttgtctttaaatagttacagaagggatacgtcatttgttaatgcttttgtgaagtgagttaaacgagctttctgtattttaatgctttagtgtttcagtttttataagtgaagattttattttaaaaaccagtgggaaagagtggggggtttctttttatgtctgggtcattcaggcagtacatctgaattaagctgaatgtagacaaataaagaaaaacaaaactaaaaaaaaaaaaaaaaaaaaaa

SEQ ID NO: 1255 - DNA, 3234 bp, Homo sapiens
cgcctgcccgcccgcccgctcgcccccggtccggactcctcctcctcctcttctcgccattgcagttggacccagcagcccggcgcgcaccgcgtggcttttgggggcagaccccggcgggctgtggcaggagggcggcggcggcggctgcggtcgaagaaggggacgccgacaagagttgaagtattgataacaccaaggaactctatcacaatttgaaaagataagcaaaagtttgatttccagacactacagaagaagtaaaaatgcgtccaatgcgaatttttgtgaatgatgaccgccatgtgatggcaaagcattcttccgtttatccaacacaagaggagctggaggcagtccagaacatggtgtcccacacggagcgggcgctcaaagctgtgtccgactggatagacgagcaggaaaagggtagcagcgagcaggcagagtccgataacatggatgtgcccccagaggacgacagtaaagaaggggctggggaacagaagacggagcacatgaccagaaccctgcggggagtgatgcgggtgggcctggtggcaaagggcctcctactcaagggggacttggatctggagctggtgctgctgtgtaaggagaagcccacaaccgccctcctggacaaggtggccgacaacctggccatccagcttgctgctgtaacagaagacaagtacgaaatactgcaatctgtcgacgatgctgcgattgtgataaaaaacacaaaagagcctccattgtccctgaccatccacctgacatcccctgttgtcagagaagaaatggagaaagtattagctggagaaacgctatcagtcaacgaccccccggacgttctggacaggcagaaatgccttgctgccttggcgtccctccgacacgccaagtggttccaggccagagccaacgggctgaagtcttgtgtcattgtgatccgggtcttgagggacctgtgcactcgcgtgcccacctggggtcccctccgaggctggcctctcgagctcctgtgtgagaaatccattggcacggccaacagaccgatgggtgctggcgaggccctgcggagagtgctggagtgcctggcgtcgggcatcgtgatgccagatggttctggcatttatgacccttgtgaaaaagaagccactgatgctattgggcatctagacagacagcaacgggaagatatcacacagagtgcgcagcacgcactgcggctcgctgccttcggccagctccataaagtcctaggcatggaccctctgccttccaagatgcccaagaaaccaaagaatgaaaacccagtggactacaccgttcagatcccaccaagcaccacctatgccattacgcccatgaaacgcccaatggaggaggacggggaggagaagtcgcccagcaaaaagaagaagaagattcagaagaaagaggagaaggcagagcccccccaggctatgaatgccctgatgcggttgaaccagctgaagccagggctgcagtacaagctggtgtcccagactgggcccgtccatgcccccatctttaccatgtctgtggaggttgatggcaattcattcgaggcctctgggccctccaaaaagacggccaagctgcacgtggccgttaaggtgttacaggacatgggcttgccgacgggtgctgaaggcagggactcgagcaagggggaggactcggctgaggagaccgaggcgaagccagcagtggtggcccctgccccagtggtagaagctgtctccacccctagtgcggcctttccctcagatgccactgccgagcaggggccgatcctgacaaagcacggcaagaacccagtcatggagctgaacgagaagaggcgtgggctcaagtacgagctcatctccgagaccgggggcagccacgacaagcgcttcgtcatggaggtcgaagtggatggacagaagttccaaggtgctggttccaacaaaaaggtggcgaaggcctacgctgctcttgctgccctagaaaagcttttccctgacacccctctcgcccttgatgccaacaaaaagaagagagccccagtacccgtcagagggggaccgaaatttgctgctaagccacataaccctggcttcggcatgggaggccccatgcacaacgaagtgcccccaccccccaaccttcgagggcggggaagaggcgggagcatccggggacgagggcgcgggcgaggatttggtggcgccaaccatggaggctacatgaatgccggtgctgggtatggaagctatgggtacggaggcaactcggcgacagcaggctacacaggttttgtatgaatttttaaccttttaacaaactcccaaatctggttgatgcctttgacagtgatgaaaacgatttcaccacatctgaatccagagaaaccggctttttttcttattgcgagcatgttaaaacgttgggaacatgtggggaattgtatattgcgctgaattaacttctcccgcctcttgtaatgctctggtgggttcttgtttgggaatgcgatattttgtggctggtttagctagagagtgaactctcaaaggtatcaaaactgtgcttccattattagtgcaagaaacagacaggctttaaggggtagatgacgtgaaattttgcaagtcttaattacagctgcagatgcatgggattctggatttttttgttgctttttagtttaatgggactttaaaagtaattgaggagaaagaaccgtgatgttccctgtttctccagtaaaggactggcttttgcttgggcagaggtggtgctgctgggtgtgcagctgccacagactccaaaggcgtagaagtttgtgccaacacacggagtcattctggctctctgctgaggcccctgttttctggcaggtgccctccttggaaactggttttggctctgatcagcggttctttttgcagcaaagcctgcatctgtgttgacttgcaagattttgcgtttattcaggcaaaaactggtcaaaatggttactacatgatttgttcccagaggtttgaaacattcagtgaaactttttaaaactttgattgcatgatgtattttttttttagaaagttattgtttgagaataatgtctttttataccaggaaaatagttatcctgaatgacgttgaaaactccccctcccctttatttttttttaatcaatacatgtgaaagtaacaagc

SEQ ID NO: 1256 - DNA, 5051 bp, Homo sapiens
cggccgcgcaggcgcaaaatgtcgcagccgtagggaggctccgcctctgacgcttgccttgcatcacgtggtaatggccgctcaaaaaacgccttagcgaaaaccagagcgtgccctcgtcacgtgatggaggactcccagtacggcaaagggaaggcgccaaaagttgtcagatggcgaaggaaaccgcgaaattcgccattgtcacatgatggagcaacctatcgaaagcggagggaaaggtgccgaagtcacgtgactacgcacgcaaacactcccgcttgcaccacgtgcaactcacgcccaccccctcagccccccccttatctcttttcgcccctccctcccatttgggttgggcctgcgtcgaggcgcaacgcggcgtcaaagggggcggggcttcagccggtcacgtgttcccgcacctccccggcgcgcgcctgcccgcccgcccgctcgcccccggtccggactcctcctcctcctcttctcgccattgcagttggacccagcagcccggcgcgcaccgcgtggcttttgggggcagaccccggcgggctgtggcaggagggcggcggcggcggctgcggtcgaagaaggggacgccgacaagagttgaagtattgataacaccaaggaactctatcacaatttgaaaagataagcaaaagtttgatttccagacactacagaagaagtaaaaatgcgtccaatgcgaatttttgtgaatgatgaccgccatgtgatggcaaagcattcttccgtttatccaacacaagaggagctggaggcagtccagaacatggtgtcccacacggagcgggcgctcaaagctgtgtccgactggatagacgagcaggaaaagggtagcagcgagcaggcagagtccgataacatggatgtgcccccagaggacgacagtaaagaaggggctggggaacagaagacggagcacatgaccagaaccctgcggggagtgatgcgggtgggcctggtggcaaagggcctcctactcaagggggacttggatctggagctggtgctgctgtgtaaggagaagcccacaaccgccctcctggacaaggtggccgacaacctggccatccagcttgctgctgtaacagaagacaagtacgaaatactgcaatctgtcgacgatgctgcgattgtgataaaaaacacaaaagagcctccattgtccctgaccatccacctgacatcccctgttgtcagagaagaaatggagaaagtattagctggagaaacgctatcagtcaacgaccccccggacgttctggacaggcagaaatgccttgctgccttggcgtccctccgacacgccaagtggttccaggccagagccaacgggctgaagtcttgtgtcattgtgatccgggtcttgagggacctgtgcactcgcgtgcccacctggggtcccctccgaggctggcctctcgagctcctgtgtgagaaatccattggcacggccaacagaccgatgggtgctggcgaggccctgcggagagtgctggagtgcctggcgtcgggcatcgtgatgccagatggttctggcatttatgacccttgtgaaaaagaagccactgatgctattgggcatctagacagacagcaacgggaagatatcacacagagtgcgcagcacgcactgcggctcgctgccttcggccagctccataaagtcctaggcatggaccctctgccttccaagatgcccaagaaaccaaagaatgaaaacccagtggactacaccgttcagatcccaccaagcaccacctatgccattacgcccatgaaacgcccaatggaggaggacggggaggagaagtcgcccagcaaaaagaagaagaagattcagaagaaagaggagaaggcagagcccccccaggctatgaatgccctgatgcggttgaaccagctgaagccagggctgcagtacaagctggtgtcccagactgggcccgtccatgcccccatctttaccatgtctgtggaggttgatggcaattcattcgaggcctctgggccctccaaaaagacggccaagctgcacgtggccgttaaggtgttacaggacatgggcttgccgacgggtgctgaaggcagggactcgagcaagggggaggactcggctgaggagaccgaggcgaagccagcagtggtggcccctgccccagtggtagaagctgtctccacccctagtgcggcctttccctcagatgccactgccgagcaggggccgatcctgacaaagcacggcaagaacccagtcatggagctgaacgagaagaggcgtgggctcaagtacgagctcatctccgagaccgggggcagccacgacaagcgcttcgtcatggaggtcgaagtggatggacagaagttccaaggtgctggttccaacaaaaaggtggcgaaggcctacgctgctcttgctgccctagaaaagcttttccctgacacccctctcgcccttgatgccaacaaaaagaagagagccccagtacccgtcagagggggaccgaaatttgctgctaagccacataaccctggcttcggcatgggaggccccatgcacaacgaagtgcccccaccccccaaccttcgagggcggggaagaggcgggagcatccggggacgagggcgcgggcgaggatttggtggcgccaaccatggaggctacatgaatgccggtgctgggtatggaagctatgggtacggaggcaactcggcgacagcaggctacagtaactggccctccaggcccccgcccccatcccgtccacgttgctgtgtcgtgaggtgcagcgggtcaccctgtggcccgtcctgtgacccatatttagccgtgtttgggactccgtgtcttcaatggtttgttagttgccattacaactttgtctgggtagagtttttgagtttttgcagttcagtatccctctgtctattcacacttcgtgttagtggtaactcagtttgtctttaaatagttacagaagggatacgtcatttgttaatgcttttgtgaagtgagttaaacgagctttctgtattttaatgctttagtgtttcagttttataagtgaagattttattttaaaaaccagtgggaaagagtggggggtttctttttatgtctgggtcattcaggcagtacatctgaattaagctgaatgtagacaaataaagaaaaacaaaactgcgcccgtcttaggcctgggtgtctgacccaccagcagtgcaatgggcaggtttccccactctattcctgctcttgggaaagcagcgtgggccatcaggatggtccctggtccttagagagggtccagttcaggcttctagacattttactcatgctcagcgaaggctggttcctggtcccctgggctgtgtagacccggtgtcccaccaggctccaggctcccaccatctacagaggggcttacagcgcccattctggtcttggggaacccatcacaaaataggctttttctgctccccgattctggtgtagttctaagtacacagtgatgtcctctgtaggggcgtgcctgtggtggaacataacgcagttacaaaagaaagggcaggtgaggcctgggtaaccccagccatggaccgtcagtggctggagggagcttcgtgtctgtgctggagctgcagcctgctcgccatctggaggctcagtggagtggggagttggggttctcataccagcagatttccctagagcgtgattctcccatctgaggcaatcttgcctcccaggggaaattttgcaatgtttggaggatgttgtcacagctagtagcgggtgctctgggatctggtggatagatgccaaggatgctgtcaagcatactgtactgcccagaacagtggcccatagcagggacctgccctatcaaaatatcaggtgtatggaggtggagtcccaacgctagagcagcccttctcagctccaccctgcccggggagggaggaggagctctggtttcagagcagtgccgggattgcctttccccaggatctgtgtcggccatccaggaagaactgtactggccaagcctgggaccacacgtctgcagagatcctgctctgctggcctgagccccaggccttggcctcctgtgcttgggtaaccatggccactgggaaaagcaaggaccgtgtttgactttcttggagaggtgaaagaggtgaaagaacaagttgtgtgctagaaaacttttgaggaattcttatttgtgttagagcagaggaggtcccagataccaagtggcgcctcccaggaaaggctgggagaagaggtggcctggagtaccccgagatcccagcagcgcacacagtggagggatgaggatggatgggtcctaacccctgattttgatgggatgtgttcatgtcctatctcctctcctggacacattaaggggttgggacaagaagagactcctgtgagatcagcagacctcgtgtttaaggagagaatgcctgcctgcaacactcatggagagggacacttcctggccccacctgctaaatacctccaaactctgggcaggcgcctgcattctcaacacaggacttcccttaacagtttccggatcagtgaccaccaccacgttcaggtttctgaatgcatgcggcacagcaggcacgtgcctggagagaacagctcctgagcacagcacccttggagccctcaccccgctcacgatcctcaccagtgctgatgatgccgtcatgctgctggcctgagacagtatcccagctacaacaggacgacaccgggttcaggaatatgtggctatcaccttgagcactgacagtggccttccaggctagttgccttccaaacgcaggtagccgacctgcaggagggcctacaaacgggcccagcaagagctgggcaacagctggcttgtgaaatgagacaccttgaccaatatgctttcccagagggctcaggatgccccaggaaggaaagaagggcaacagactacacgattggacgtgtgtggttgactgggatg

SEQ ID NO: 1257 - DNA, 5774 bp, Homo sapiens
cgtccaatgcgaatttttgtgaatgatgaccgccatgtgatggcaaagcattcttccgtttatccaacacaagaggagctggaggcagtccagaacatggtgtcccacacggagcgggcgctcaaagctgtgtccgactggatagacgagcaggaaaagggtagcagcgagcaggcagagtccgataacatggatgtgcccccagaggacgacagtaaagaaggggctggggaacagaagacggagcacatgaccagaaccctgcggggagtgatgcgggtgggcctggtggcaaagggcctcctactcaagggggacttggatctggagctggtgctgctgtgtaaggagaagcccacaaccgccctcctggacaaggtggccgacaacctggccatccagcttgctgctgtaacagaagacaagtacgaaatactgcaatctgtcgacgatgctgcgattgtgataaaaaacacaaaagagcctccattgtccctgaccatccacctgacatcccctgttgtcagagaagaaatggagaaagtattagctggagaaacgctatcagtcaacgaccccccggacgttctggacaggcagaaatgccttgctgccttggcgtccctccgacacgccaagtggttccaggccagagccaacgggctgaagtcttgtgtcattgtgatccgggtcttgagggacctgtgcactcgcgtgcccacctggggtcccctccgaggctggcctctcgagctcctgtgtgagaaatccattggcacggccaacagaccgatgggtgctggcgaggccctgcggagagtgctggagtgcctggcgtcgggcatcgtgatgccagatggttctggcatttatgacccttgtgaaaaagaagccactgatgctattgggcatctagacagacagcaacgggaagatatcacacagagtgcgcagcacgcactgcggctcgctgccttcggccagctccataaagtcctaggcatggaccctctgccttccaagatgcccaagaaaccaaagaatgaaaacccagtggactacaccgttcagatcccaccaagcaccacctatgccattacgcccatgaaacgcccaatggaggaggacggggaggagaagtcgcccagcaaaaagaagaagaagattcagaagaaagaggagaaggcagagcccccccaggctatgaatgccctgatgcggttgaaccagctgaagccagggctgcagtacaagctggtgtcccagactgggcccgtccatgcccccatctttaccatgtctgtggaggttgatggcaattcattcgaggcctctgggccctccaaaaagacggccaagctgcacgtggccgttaaggtgttacaggacatgggcttgccgacgggtgctgaaggcagggactcgagcaagggggaggactcggctgaggagaccgaggcgaagccagcagtggtggcccctgccccagtggtagaagctgtctccacccctagtgcggcctttccctcagatgccactgccgagcaggggccgatcctgacaaagcacggcaagaacccagtcatggagctgaacgagaagaggcgtgggctcaagtacgagctcatctccgagaccgggggcagccacgacaagcgcttcgtcatggaggtcgaagtggatggacagaagttccaaggtgctggttccaacaaaaaggtggcgaaggcctacgctgctcttgctgccctagaaaagcttttccctgacacccctctcgcccttgatgccaacaaaaagaagagagccccagtacccgtcagagggggaccgaaatttgctgctaagccacataaccctggcttcggcatgggaggccccatgcacaacgaagtgcccccaccccccaaccttcgagggcggggaagaggcgggagcatccggggacgagggcgcgggcgaggatttggtggcgccaaccatggaggctacatgaatgccggtgctgggtatggaagctatgggtacggaggcaactcggcgacagcaggctacagtcagttctacagcaacggagggcattctgggaatgccagtggcggtggcggcgggggcggtggtggctcctccggctatggctcctactaccaaggtgacaactacaactcaccggtgcccccaaaacacgctgggaagaagcagccgcacgggggccagcagaagccctcctacggctcgggctaccagtcccaccagggccagcagcagtcctacaaccagagcccctacagcaactatggccctccacagggcaagcagaaaggctataaccatggacaaggcagctactcctactcgaactcctacaactctcccgggggcgggggcggatccgactacaactacgagagcaaattcaactacagtggtagtggaggccgaagcggcgggaacagctacggctcaggcggggcatcctacaacccagggtcacacgggggctacggcggaggttctgggggcggctcctcataccaaggcaaacaaggaggctactcacagtcgaactacaactccccggggtccggccagaactacagtggccctcccagctcctaccagtcctcacaaggcggctatggcagaaacgcagaccacagcatgaactaccagtacagataagcccccgcggggcggagatttctaccttctgcacttactccccatcagaagatcgagttttatgcatcacagttaacatgtcagctggccctccaggcccccgcccccatcccgtccacgttgctgtgtcgtgaggtgcagcgggtcaccctgtggcccgtcctgtgacccatatttagccgtgtttgggactccgtgtcttcaatggtttgttagttgccattacaactttgtctgggtagagtttttgagtttttgcagttcagtatccctctgtctattcacacttcgtgttagtggtaactcagtttgtctttaaatagttacagaagggatacgtcatttgttaatgcttttgtgaagtgagttaaacgagctttctgtattttaatgctttagtgtttcagttttataagtgaagattttattttaaaaaccagtgggaaagagtggggggtttctttttatgtctgggtcattcaggcagtacatctgaattaagctgaatgtagacaaataaagaaaaacaaaactgcgcccgtcttaggcctgggtgtctgacccaccagcagtgcaatgggcaggtttccccactctattcctgctcttgggaaagcagcgtgggccatcaggatggtccctggtccttagagagggtccagttcaggcttctagacattttactcatgctcagcgaaggctggttcctggtcccctgggctgtgtagacccggtgtcccaccaggctccaggctcccaccatctacagaggggcttacagcgcccattctggtcttggggaacccatcacaaaataggctttttctgctccccgattctggtgtagttctaagtacacagtgatgtcctctgtaggggcgtgcctgtggtggaacataacgcagttacaaaagaaagggcaggtgaggcctgggtaaccccagccatggaccgtcagtggctggagggagcttcgtgtctgtgctggagctgcagcctgctcgccatctggaggctcagtggagtggggagttggggttctcataccagcagatttccctagagcgtgattctcccatctgaggcaatcttgcctcccaggggaaattttgcaatgtttggaggatgttgtcacagctagtagcgggtgctctgggatctggtggatagatgccaaggatgctgtcaagcatactgtactgcccagaacagtggcccatagcagggacctgccctatcaaaatatcaggtgtatggaggtggagtcccaacgctagagcagcccttctcagctccaccctgcccggggagggaggaggagctctggtttcagagcagtgccgggattgcctttccccaggatctgtgtcggccatccaggaagaactgtactggccaagcctgggaccacacgtctgcagagatcctgctctgctggcctgagccccaggccttggcctcctgtgcttgggtaaccatggccactgggaaaagcaaggaccgtgtttgactttcttggagaggtgaaagaggtgaaagaacaagttgtgtgctagaaaacttttgaggaattcttatttgtgttagagcagaggaggtcccagataccaagtggcgcctcccaggaaaggctgggagaagaggtggcctggagtaccccgagatcccagcagcgcacacagtggagggatgaggatggatgggtcctaacccctgattttgatgggatgtgttcatgtcctatctcctctcctggacacattaaggggttgggacaagaagagactcctgtgagatcagcagacctcgtgtttaaggagagaatgcctgcctgcaacactcatggagagggacacttcctggccccacctgctaaatacctccaaactctgggcaggcgcctgcattctcaacacaggacttcccttaacagtttccggatcagtgaccaccaccacgttcaggtttctgaatgcagacccaccacgagggatggattccacccgcccgccctgctgcagatacatgcggcacagcaggcacgtgcctggagagaacagctcctgagcacagcacccttggagccctcaccccgctcacgatcctcaccagtgctgatgatgccgtcatgctgctggcctgagacagtatcccagctacaacaggacgacaccgggttcaggaatatgtggctatcaccttgagcactgacagtggccttccaggctagttgccttccaaacgcaggtagccgacctgcaggagggcctacaaacgggcccagcaagagctgggcaacagctggcttgtgaaatgagacaccttgaccaatatgctttgggtggacggtctcctacatgttcagtggaggccaccaggagcatccatgagcggggaaggggtccacacccttacatggcaagttgatacgatggggtgcttggtggatgggccatggaggtccgtgagctggaactgggcacacgccatcccagagggctcaggatgccccaggaaggaaagaagggcaacagactacacgattggacgtgtgtggttgactgggatgaagttggagggaggggcagggccttgcaggggattggtactgatcccagggaggaagtgttggggcttcatgaactaggatgaaaggaggcccctgagccatgacaaggggcacatccaggatttccgccaccctgaatttagtagagctagtaggccctggtcgtcactctgggcagggatgccgtcagccttgagggtcgccacccacctgtgtgttgccctctgtcctggcggggaaacatacaccccttgtctcaccaccaaccttgcttgtgtagtcagcagggctggccctgccccaaggactcactgcatgtacccggacccctaggcctggcctttgcagcatagttgggagcttctggattccatctgcacctgtgagccccatgctggctgtgcactgcgcgggcctgagactgctggatacaatgttgggcaacaactcagccagcctgatggcagcctcagaggcttactctaacccatcccagaataaatggagacttcatgtgttcatt

SEQ ID NO: 1258 - DNA, 5757 bp, Homo sapiens
cggccgcgcaggcgcaaaatgtcgcagccgtagggaggctccgcctctgacgcttgccttgcatcacgtggtaatggccgctcaaaaaacgccttagcgaaaaccagagcgtgccctcgtcacgtgatggaggactcccagtacggcaaagggaaggcgccaaaagttgtcagatggcgaaggaaaccgcgaaattcgccattgtcacatgatggagcaacctatcgaaagcggagggaaaggtgccgaagtcacgtgactacgcacgcaaacactcccgcttgcaccacgtgcaactcacgcccaccccctcagccccccccttatctcttttcgcccctccctcccatttgggttgggcctgcgtcgaggcgcaacgcggcgtcaaagggggcggggcttcagccggtcacgtgttcccgcacctccccggcgcgcgcctgcccgcccgcccgctcgcccccggtccggactcctcctcctcctcttctcgccattgcagttggacccagcagcccggcgcgcaccgcgtggcttttgggggcagaccccggcgggctgtggcaggagggcggcggcggcggctgcggtcgaagaaggggacgccgacaagagttgaagtattgataacaccaaggaactctatcacaatttgaaaagataagcaaaagtttgatttccagacactacagaagaagtaaaaatgcgtccaatgcgaatttttgtgaatgatgaccgccatgtgatggcaaagcattcttccgtttatccaacacaagaggagctggaggcagtccagaacatggtgtcccacacggagcgggcgctcaaagctgtgtccgactggatagacgagcaggaaaagggtagcagcgagcaggcagagtccgataacatggatgtgcccccagaggacgacagtaaagaaggggctggggaacagaagacggagcacatgaccagaaccctgcggggagtgatgcgggtgggcctggtggcaaagggcctcctactcaagggggacttggatctggagctggtgctgctgtgtaaggagaagcccacaaccgccctcctggacaaggtggccgacaacctggccatccagcttgctgctgtaacagaagacaagtacgaaatactgcaatctgtcgacgatgctgcgattgtgataaaaaacacaaaagagcctccattgtccctgaccatccacctgacatcccctgttgtcagagaagaaatggagaaagtattagctggagaaacgctatcagtcaacgaccccccggacgttctggacaggcagaaatgccttgctgccttggcgtccctccgacacgccaagtggttccaggccagagccaacgggctgaagtcttgtgtcattgtgatccgggtcttgagggacctgtgcactcgcgtgcccacctggggtcccctccgaggctggcctctcgagctcctgtgtgagaaatccattggcacggccaacagaccgatgggtgctggcgaggccctgcggagagtgctggagtgcctggcgtcgggcatcgtgatgccagatggttctggcatttatgacccttgtgaaaaagaagccactgatgctattgggcatctagacagacagcaacgggaagatatcacacagagtgcgcagcacgcactgcggctcgctgccttcggccagctccataaagtcctaggcatggaccctctgccttccaagatgcccaagaaaccaaagaatgaaaacccagtggactacaccgttcagatcccaccaagcaccacctatgccattacgcccatgaaacgcccaatggaggaggacggggaggagaagtcgcccagcaaaaagaagaagaagattcagaagaaagaggagaaggcagagcccccccaggctatgaatgccctgatgcggttgaaccagctgaagccagggctgcagtacaagctggtgtcccagactgggcccgtccatgcccccatctttaccatgtctgtggaggttgatggcaattcattcgaggcctctgggccctccaaaaagacggccaagctgcacgtggccgttaaggtgttacaggacatgggcttgccgacgggtgctgaaggcagggactcgagcaagggggaggactcggctgaggagaccgaggcgaagccagcagtggtggcccctgccccagtggtagaagctgtctccacccctagtgcggcctttccctcagatgccactgccgagcaggggccgatcctgacaaagcacggcaagaacccagtcatggagctgaacgagaagaggcgtgggctcaagtacgagctcatctccgagaccgggggcagccacgacaagcgcttcgtcatggaggtcgaagtggatggacagaagttccaaggtgctggttccaacaaaaaggtggcgaaggcctacgctgctcttgctgccctagaaaagcttttccctgacacccctctcgcccttgatgccaacaaaaagaagagagccccagtacccgtcagagggggaccgaaatttgctgctaagccacataaccctggcttcggcatgggaggccccatgcacaacgaagtgcccccaccccccaaccttcgagggcggggaagaggcgggagcatccggggacgagggcgcgggcgaggatttggtggcgccaaccatggaggctacatgaatgccggtgctgggtatggaagctatgggtacggaggcaactcggcgacagcaggctacagtcagttctacagcaacggagggcattctgggaatgccagtggcggtggcggcgggggcggtggtggctcctccggctatggctcctactaccaaggtgacaactacaactcaccggtgcccccaaaacacgctgggaagaagcagccgcacgggggccagcagaagccctcctacggctcgggctaccagtcccaccagggccagcagcagtcctacaaccagagcccctacagcaactatggccctccacagggcaagcagaaaggctataaccatggacaaggcagctactcctactcgaactcctacaactctcccgggggcgggggcggatccgactacaactacgagagcaaattcaactacagtggtagtggaggccgaagcggcgggaacagctacggctcaggcggggcatcctacaacccagggtcacacgggggctacggcggaggttctgggggcggctcctcataccaaggcaaacaaggaggctactcacagtcgaactacaactccccggggtccggccagaactacagtggccctcccagctcctaccagtcctcacaaggcggctatggcagaaacgcagaccacagcatgaactaccagtacagataagcccccgcggggcggagatttctaccttctgcacttactccccatcagaagatcgagttttatgcatcacagttaacatgtcagctggccctccaggcccccgcccccatcccgtccacgttgctgtgtcgtgaggtgcagcgggtcaccctgtggcccgtcctgtgacccatatttagccgtgtttgggactccgtgtcttcaatggtttgttagttgccattacaactttgtctgggtagagtttttgagtttttgcagttcagtatccctctgtctattcacacttcgtgttagtggtaactcagtttgtctttaaatagttacagaagggatacgtcatttgttaatgcttttgtgaagtgagttaaacgagctttctgtattttaatgctttagtgtttcagttttataagtgaagattttattttaaaaaccagtgggaaagagtggggggtttctttttatgtctgggtcattcaggcagtacatctgaattaagctgaatgtagacaaataaagaaaaacaaaactgcgcccgtcttaggcctgggtgtctgacccaccagcagtgcaatgggcaggtttccccactctattcctgctcttgggaaagcagcgtgggccatcaggatggtccctggtccttagagagggtccagttcaggcttctagacattttactcatgctcagcgaaggctggttcctggtcccctgggctgtgtagacccggtgtcccaccaggctccaggctcccaccatctacagaggggcttacagcgcccattctggtcttggggaacccatcacaaaataggctttttctgctccccgattctggtgtagttctaagtacacagtgatgtcctctgtaggggcgtgcctgtggtggaacataacgcagttacaaaagaaagggcaggtgaggcctgggtaaccccagccatggaccgtcagtggctggagggagcttcgtgtctgtgctggagctgcagcctgctcgccatctggaggctcagtggagtggggagttggggttctcataccagcagatttccctagagcgtgattctcccatctgaggcaatcttgcctcccaggggaaattttgcaatgtttggaggatgttgtcacagctagtagcgggtgctctgggatctggtggatagatgccaaggatgctgtcaagcatactgtactgcccagaacagtggcccatagcagggacctgccctatcaaaatatcaggtgtatggaggtggagtcccaacgctagagcagcccttctcagctccaccctgcccggggagggaggaggagctctggtttcagagcagtgccgggattgcctttccccaggatctgtgtcggccatccaggaagaactgtactggccaagcctgggaccacacgtctgcagagatcctgctctgctggcctgagccccaggccttggcctcctgtgcttgggtaaccatggccactgggaaaagcaaggaccgtgtttgactttcttggagaggtgaaagaggtgaaagaacaagttgtgtgctagaaaacttttgaggaattcttatttgtgttagagcagaggaggtcccagataccaagtggcgcctcccaggaaaggctgggagaagaggtggcctggagtaccccgagatcccagcagcgcacacagtggagggatgaggatggatgggtcctaacccctgattttgatgggatgtgttcatgtcctatctcctctcctggacacattaaggggttgggacaagaagagactcctgtgagatcagcagacctcgtgtttaaggagagaatgcctgcctgcaacactcatggagagggacacttcctggccccacctgctaaatacctccaaactctgggcaggcgcctgcattctcaacacaggacttcccttaacagtttccggatcagtgaccaccaccacgttcaggtttctgaatgcatgcggcacagcaggcacgtgcctggagagaacagctcctgagcacagcacccttggagccctcaccccgctcacgatcctcaccagtgctgatgatgccgtcatgctgctggcctgagacagtatcccagctacaacaggacgacaccgggttcaggaatatgtggctatcaccttgagcactgacagtggccttccaggctagttgccttccaaacgcaggtagccgacctgcaggagggcctacaaacgggcccagcaagagctgggcaacagctggcttgtgaaatgagacaccttgaccaatatgctttcccagagggctcaggatgccccaggaaggaaagaagggcaacagactacacgattggacgtgtgtggttgactgggatg

SEQ ID NO: 1259 - DNA, 3728 bp, Homo sapiens
cggccgcgcaggcgcaaaatgtcgcagccgtagggaggctccgcctctgacgcttgccttgcatcacgtggtaatggccgctcaaaaaacgccttagcgaaaaccagagcgtgccctcgtcacgtgatggaggactcccagtacggcaaagggaaggcgccaaaagttgtcagatggcgaaggaaaccgcgaaattcgccattgtcacatgatggagcaacctatcgaaagcggagggaaaggtgccgaagtcacgtgactacgcacgcaaacactcccgcttgcaccacgtgcaactcacgcccaccccctcagccccccccttatctcttttcgcccctccctcccatttgggttgggcctgcgtcgaggcgcaacgcggcgtcaaagggggcggggcttcagccggtcacgtgttcccgcacctccccggcgcgcgcctgcccgcccgcccgctcgcccccggtccggactcctcctcctcctcttctcgccattgcagttggacccagcagcccggcgcgcaccgcgtggcttttgggggcagaccccggcgggctgtggcaggagggcggcggcggcggctgcggtcgaagaaggggacgccgacaagagttgaagtattgataacaccaaggaactctatcacaatttgaaaagataagcaaaagtttgatttccagacactacagaagaagtaaaaatgcgtccaatgcgaatttttgtgaatgatgaccgccatgtgatggcaaagcattcttccgtttatccaacacaagaggagctggaggcagtccagaacatggtgtcccacacggagcgggcgctcaaagctgtgtccgactggatagacgagcaggaaaagggtagcagcgagcaggcagagtccgataacatggatgtgcccccagaggacgacagtaaagaaggggctggggaacagaagacggagcacatgaccagaaccctgcggggagtgatgcgggtgggcctggtggcaaagggcctcctactcaagggggacttggatctggagctggtgctgctgtgtaaggagaagcccacaaccgccctcctggacaaggtggccgacaacctggccatccagcttgctgctgtaacagaagacaagtacgaaatactgcaatctgtcgacgatgctgcgattgtgataaaaaacacaaaagagcctccattgtccctgaccatccacctgacatcccctgttgtcagagaagaaatggagaaagtattagctggagaaacgctatcagtcaacgaccccccggacgttctggacaggcagaaatgccttgctgccttggcgtccctccgacacgccaagtggttccaggccagagccaacgggctgaagtcttgtgtcattgtgatccgggtcttgagggacctgtgcactcgcgtgcccacctggggtcccctccgaggctggcctctcgagctcctgtgtgagaaatccattggcacggccaacagaccgatgggtgctggcgaggccctgcggagagtgctggagtgcctggcgtcgggcatcgtgatgccagatggttctggcatttatgacccttgtgaaaaagaagccactgatgctattgggcatctagacagacagcaacgggaagatatcacacagagtgcgcagcacgcactgcggctcgctgccttcggccagctccataaagtcctaggcatggaccctctgccttccaagatgcccaagaaaccaaagaatgaaaacccagtggactacaccgttcagatcccaccaagcaccacctatgccattacgcccatgaaacgcccaatggaggaggacggggaggagaagtcgcccagcaaaaagaagaagaagattcagaagaaagaggagaaggcagagcccccccaggctatgaatgccctgatgcggttgaaccagctgaagccagggctgcagtacaagctggtgtcccagactgggcccgtccatgcccccatctttaccatgtctgtggaggttgatggcaattcattcgaggcctctgggccctccaaaaagacggccaagctgcacgtggccgttaaggtgttacaggacatgggcttgccgacgggtgctgaaggcagggactcgagcaagggggaggactcggctgaggagaccgaggcgaagccagcagtggtggcccctgccccagtggtagaagctgtctccacccctagtgcggcctttccctcagatgccactgccgagcaggggccgatcctgacaaagcacggcaagaacccagtcatggagctgaacgagaagaggcgtgggctcaagtacgagctcatctccgagaccgggggcagccacgacaagcgcttcgtcatggaggtcgaagtggatggacagaagttccaaggtgctggttccaacaaaaaggtggcgaaggcctacgctgctcttgctgccctagaaaagcttttccctgacacccctctcgcccttgatgccaacaaaaagaagagagccccagtacccgtcagagggggaccgaaatttgctgctaagccacataaccctggcttcggcatgggaggccccatgcacaacgaagtgcccccaccccccaaccttcgagggcggggaagaggcgggagcatccggggacgagggcgcgggcgaggatttggtggcgccaaccatggaggctacatgaatgccggtgctgggtatggaagctatgggtacggaggcaactcggcgacagcaggctacagtgactttttcacagactgctacggctatcatgattttgggtcttcctagagcgtctaaaagtattgcacacaaaatcaactttttactccaatttcctccaactccaaaacccaaagtgtccgtgctgtgtccctgtgcttcactgggtttctcaaccgtggcttttcaccgcagcttgtctgaaactcttagcctgcagaatttaagacaatggcagtttttatcgtgatttgcctttgaacttggtcctattgaagttcacaataagtggaaaacaattttttcagagaatgtatttttgtgcagaattgcacagaattctagagacagcgttgttcggcatcaaggcaaaagcccacctttgctttttatggaaagcattactttatttaaagagacagacaatgacgcattttaatctacctttgtcttaatttacagcaggttttgtatgaatttttaaccttttaacaaactcccaaatctggttgatgcctttgacagtgatgaaaacaaaggactggcttttgcttgggcagaggtggtgctgctgggtgtgcagctgccacagactccaaaggcgtagaagtttgtgccaacacacggagtcattctggctctctgctgaggcccctgttttctggcaggtgccctccttggaaactggttttggctctgatcagcggttctttttgcagcaaagcctgcatctgtgttgacttgcaagattttgcgtttattcaggcaaaaactggtcaaaatggttactacatgatttgttcccagaggtttgaaacattcagtgaaactttttaaaactttgattgcatgatgtattttttttttagaaagttattgtttgagaataatgtctttttataccaggaaaatagttatcctgaatgacgttgaaaactccccctcccctttatttttttttaatcaatacatgtgaaagtaacaa

SEQ ID NO: 1260 - DNA, 6492 bp, Homo sapiens
cggccgcgcaggcgcaaaatgtcgcagccgtagggaggctccgcctctgacgcttgccttgcatcacgtggtaatggccgctcaaaaaacgccttagcgaaaaccagagcgtgccctcgtcacgtgatggaggactcccagtacggcaaagggaaggcgccaaaagttgtcagatggcgaaggaaaccgcgaaattcgccattgtcacatgatggagcaacctatcgaaagcggagggaaaggtgccgaagtcacgtgactacgcacgcaaacactcccgcttgcaccacgtgcaactcacgcccaccccctcagccccccccttatctcttttcgcccctccctcccatttgggttgggcctgcgtcgaggcgcaacgcggcgtcaaagggggcggggcttcagccggtcacgtgttcccgcacctccccggcgcgcgcctgcccgcccgcccgctcgcccccggtccggactcctcctcctcctcttctcgccattgcagttggacccagcagcccggcgcgcaccgcgtggcttttgggggcagaccccggcgggctgtggcaggagggcggcggcggcggctgcggtcgaagaaggggacgccgacaagagttgaagtattgataacaccaaggaactctatcacaatttgaaaagataagcaaaagtttgatttccagacactacagaagaagtaaaaatgcgtccaatgcgaatttttgtgaatgatgaccgccatgtgatggcaaagcattcttccgtttatccaacacaagaggagctggaggcagtccagaacatggtgtcccacacggagcgggcgctcaaagctgtgtccgactggatagacgagcaggaaaagggtagcagcgagcaggcagagtccgataacatggatgtgcccccagaggacgacagtaaagaaggggctggggaacagaagacggagcacatgaccagaaccctgcggggagtgatgcgggtgggcctggtggcaaagggcctcctactcaagggggacttggatctggagctggtgctgctgtgtaaggagaagcccacaaccgccctcctggacaaggtggccgacaacctggccatccagcttgctgctgtaacagaagacaagtacgaaatactgcaatctgtcgacgatgctgcgattgtgataaaaaacacaaaagagcctccattgtccctgaccatccacctgacatcccctgttgtcagagaagaaatggagaaagtattagctggagaaacgctatcagtcaacgaccccccggacgttctggacaggcagaaatgccttgctgccttggcgtccctccgacacgccaagtggttccaggccagagccaacgggctgaagtcttgtgtcattgtgatccgggtcttgagggacctgtgcactcgcgtgcccacctggggtcccctccgaggctggcctctcgagctcctgtgtgagaaatccattggcacggccaacagaccgatgggtgctggcgaggccctgcggagagtgctggagtgcctggcgtcgggcatcgtgatgccagatggttctggcatttatgacccttgtgaaaaagaagccactgatgctattgggcatctagacagacagcaacgggaagatatcacacagagtgcgcagcacgcactgcggctcgctgccttcggccagctccataaagtcctaggcatggaccctctgccttccaagatgcccaagaaaccaaagaatgaaaacccagtggactacaccgttcagatcccaccaagcaccacctatgccattacgcccatgaaacgcccaatggaggaggacggggaggagaagtcgcccagcaaaaagaagaagaagattcagaagaaagaggagaaggcagagcccccccaggctatgaatgccctgatgcggttgaaccagctgaagccagggctgcagtacaagctggtgtcccagactgggcccgtccatgcccccatctttaccatgtctgtggaggttgatggcaattcattcgaggcctctgggccctccaaaaagacggccaagctgcacgtggccgttaaggtgttacaggacatgggcttgccgacgggtgctgaaggcagggactcgagcaagggggaggactcggctgaggagaccgaggcgaagccagcagtggtggcccctgccccagtggtagaagctgtctccacccctagtgcggcctttccctcagatgccactgccgagaacgtaaaacagcaggggccgatcctgacaaagcacggcaagaacccagtcatggagctgaacgagaagaggcgtgggctcaagtacgagctcatctccgagaccgggggcagccacgacaagcgcttcgtcatggaggtcgaagtggatggacagaagttccaaggtgctggttccaacaaaaaggtggcgaaggcctacgctgctcttgctgccctagaaaagcttttccctgacacccctctcgcccttgatgccaacaaaaagaagagagccccagtacccgtcagagggggaccgaaatttgctgctaagccacataaccctggcttcggcatgggaggccccatgcacaacgaagtgcccccaccccccaaccttcgagggcggggaagaggcgggagcatccggggacgagggcgcgggcgaggatttggtggcgccaaccatggaggctacatgaatgccggtgctgggtatggaagctatgggtacggaggcaactcggcgacagcaggctacagtcagttctacagcaacggagggcattctgggaatgccagtggcggtggcggcgggggcggtggtggctcctccggctatggctcctactaccaaggtgacaactacaactcaccggtgcccccaaaacacgctgggaagaagcagccgcacgggggccagcagaagccctcctacggctcgggctaccagtcccaccagggccagcagcagtcctacaaccagagcccctacagcaactatggccctccacagggcaagcagaaaggctataaccatggacaaggcagctactcctactcgaactcctacaactctcccgggggcgggggcggatccgactacaactacgagagcaaattcaactacagtggtagtggaggccgaagcggcgggaacagctacggctcaggcggggcatcctacaacccagggtcacacgggggctacggcggaggttctgggggcggctcctcataccaaggcaaacaaggaggctactcacagtcgaactacaactccccggggtccggccagaactacagtggccctcccagctcctaccagtcctcacaaggcggctatggcagaaacgcagaccacagcatgaactaccagtacagataagcccccgcggggcggagatttctaccttctgcacttactccccatcagaagatcgagttttatgcatcacagttaacatgtcagctggccctccaggcccccgcccccatcccgtccacgttgctgtgtcgtgaggtgcagcgggtcaccctgtggcccgtcctgtgacccatatttagccgtgtttgggactccgtgtcttcaatggtttgttagttgccattacaactttgtctgggtagagtttttgagtttttgcagttcagtatccctctgtctattcacacttcgtgttagtggtaactcagtttgtctttaaatagttacagaagggatacgtcatttgttaatgcttttgtgaagtgagttaaacgagctttctgtattttaatgctttagtgtttcagttttataagtgaagattttattttaaaaaccagtgggaaagagtggggggtttctttttatgtctgggtcattcaggcagtacatctgaattaagctgaatgtagacaaataaagaaaaacaaaactgcgcccgtcttaggcctgggtgtctgacccaccagcagtgcaatgggcaggtttccccactctattcctgctcttgggaaagcagcgtgggccatcaggatggtccctggtccttagagagggtccagttcaggcttctagacattttactcatgctcagcgaaggctggttcctggtcccctgggctgtgtagacccggtgtcccaccaggctccaggctcccaccatctacagaggggcttacagcgcccattctggtcttggggaacccatcacaaaataggctttttctgctccccgattctggtgtagttctaagtacacagtgatgtcctctgtaggggcgtgcctgtggtggaacataacgcagttacaaaagaaagggcaggtgaggcctgggtaaccccagccatggaccgtcagtggctggagggagcttcgtgtctgtgctggagctgcagcctgctcgccatctggaggctcagtggagtggggagttggggttctcataccagcagatttccctagagcgtgattctcccatctgaggcaatcttgcctcccaggggaaattttgcaatgtttggaggatgttgtcacagctagtagcgggtgctctgggatctggtggatagatgccaaggatgctgtcaagcatactgtactgcccagaacagtggcccatagcagggacctgccctatcaaaatatcaggtgtatggaggtggagtcccaacgctagagcagcccttctcagctccaccctgcccggggagggaggaggagctctggtttcagagcagtgccgggattgcctttccccaggatctgtgtcggccatccaggaagaactgtactggccaagcctgggaccacacgtctgcagagatcctgctctgctggcctgagccccaggccttggcctcctgtgcttgggtaaccatggccactgggaaaagcaaggaccgtgtttgactttcttggagaggtgaaagaggtgaaagaacaagttgtgtgctagaaaacttttgaggaattcttatttgtgttagagcagaggaggtcccagataccaagtggcgcctcccaggaaaggctgggagaagaggtggcctggagtaccccgagatcccagcagcgcacacagtggagggatgaggatggatgggtcctaacccctgattttgatgggatgtgttcatgtcctatctcctctcctggacacattaaggggttgggacaagaagagactcctgtgagatcagcagacctcgtgtttaaggagagaatgcctgcctgcaacactcatggagagggacacttcctggccccacctgctaaatacctccaaactctgggcaggcgcctgcattctcaacacaggacttcccttaacagtttccggatcagtgaccaccaccacgttcaggtttctgaatgcagacccaccacgagggatggattccacccgcccgccctgctgcagatacatgcggcacagcaggcacgtgcctggagagaacagctcctgagcacagcacccttggagccctcaccccgctcacgatcctcaccagtgctgatgatgccgtcatgctgctggcctgagacagtatcccagctacaacaggacgacaccgggttcaggaatatgtggctatcaccttgagcactgacagtggccttccaggctagttgccttccaaacgcaggtagccgacctgcaggagggcctacaaacgggcccagcaagagctgggcaacagctggcttgtgaaatgagacaccttgaccaatatgctttgggtggacggtctcctacatgttcagtggaggccaccaggagcatccatgagcggggaaggggtccacacccttacatggcaagttgatacgatggggtgcttggtggatgggccatggaggtccgtgagctggaactgggcacacgccatcccagagggctcaggatgccccaggaaggaaagaagggcaacagactacacgattggacgtgtgtggttgactgggatgaagttggagggaggggcagggccttgcaggggattggtactgatcccagggaggaagtgttggggcttcatgaactaggatgaaaggaggcccctgagccatgacaaggggcacatccaggatttccgccaccctgaatttagtagagctagtaggccctggtcgtcactctgggcagggatgccgtcagccttgagggtcgccacccacctgtgtgttgccctctgtcctggcggggaaacatacaccccttgtctcaccaccaaccttgcttgtgtagtcagcagggctggccctgccccaaggactcactgcatgtacccggacccctaggcctggcctttgcagcatagttgggagcttctggattccatctgcacctgtgagccccatgctggctgtgcactgcgcgggcctgagactgctggatacaatgttgggcaacaactcagccagcctgatggcagcctcagaggcttactctaacccatcccagaataaatggagacttcatgtgttcatt

SEQ ID NO: 1261 - DNA, 6480 bp, Homo sapiens
cggccgcgcaggcgcaaaatgtcgcagccgtagggaggctccgcctctgacgcttgccttgcatcacgtggtaatggccgctcaaaaaacgccttagcgaaaaccagagcgtgccctcgtcacgtgatggaggactcccagtacggcaaagggaaggcgccaaaagttgtcagatggcgaaggaaaccgcgaaattcgccattgtcacatgatggagcaacctatcgaaagcggagggaaaggtgccgaagtcacgtgactacgcacgcaaacactcccgcttgcaccacgtgcaactcacgcccaccccctcagccccccccttatctcttttcgcccctccctcccatttgggttgggcctgcgtcgaggcgcaacgcggcgtcaaagggggcggggcttcagccggtcacgtgttcccgcacctccccggcgcgcgcctgcccgcccgcccgctcgcccccggtccggactcctcctcctcctcttctcgccattgcagttggacccagcagcccggcgcgcaccgcgtggcttttgggggcagaccccggcgggctgtggcaggagggcggcggcggcggctgcggtcgaagaaggggacgccgacaagagttgaagtattgataacaccaaggaactctatcacaatttgaaaagataagcaaaagtttgatttccagacactacagaagaagtaaaaatgcgtccaatgcgaatttttgtgaatgatgaccgccatgtgatggcaaagcattcttccgtttatccaacacaagaggagctggaggcagtccagaacatggtgtcccacacggagcgggcgctcaaagctgtgtccgactggatagacgagcaggaaaagggtagcagcgagcaggcagagtccgataacatggatgtgcccccagaggacgacagtaaagaaggggctggggaacagaagacggagcacatgaccagaaccctgcggggagtgatgcgggtgggcctggtggcaaagggcctcctactcaagggggacttggatctggagctggtgctgctgtgtaaggagaagcccacaaccgccctcctggacaaggtggccgacaacctggccatccagcttgctgctgtaacagaagacaagtacgaaatactgcaatctgtcgacgatgctgcgattgtgataaaaaacacaaaagagcctccattgtccctgaccatccacctgacatcccctgttgtcagagaagaaatggagaaagtattagctggagaaacgctatcagtcaacgaccccccggacgttctggacaggcagaaatgccttgctgccttggcgtccctccgacacgccaagtggttccaggccagagccaacgggctgaagtcttgtgtcattgtgatccgggtcttgagggacctgtgcactcgcgtgcccacctggggtcccctccgaggctggcctctcgagctcctgtgtgagaaatccattggcacggccaacagaccgatgggtgctggcgaggccctgcggagagtgctggagtgcctggcgtcgggcatcgtgatgccagatggttctggcatttatgacccttgtgaaaaagaagccactgatgctattgggcatctagacagacagcaacgggaagatatcacacagagtgcgcagcacgcactgcggctcgctgccttcggccagctccataaagtcctaggcatggaccctctgccttccaagatgcccaagaaaccaaagaatgaaaacccagtggactacaccgttcagatcccaccaagcaccacctatgccattacgcccatgaaacgcccaatggaggaggacggggaggagaagtcgcccagcaaaaagaagaagaagattcagaagaaagaggagaaggcagagcccccccaggctatgaatgccctgatgcggttgaaccagctgaagccagggctgcagtacaagctggtgtcccagactgggcccgtccatgcccccatctttaccatgtctgtggaggttgatggcaattcattcgaggcctctgggccctccaaaaagacggccaagctgcacgtggccgttaaggtgttacaggacatgggcttgccgacgggtgctgaaggcagggactcgagcaagggggaggactcggctgaggagaccgaggcgaagccagcagtggtggcccctgccccagtggtagaagctgtctccacccctagtgcggcctttccctcagatgccactgccgagcaggggccgatcctgacaaagcacggcaagaacccagtcatggagctgaacgagaagaggcgtgggctcaagtacgagctcatctccgagaccgggggcagccacgacaagcgcttcgtcatggaggtcgaagtggatggacagaagttccaaggtgctggttccaacaaaaaggtggcgaaggcctacgctgctcttgctgccctagaaaagcttttccctgacacccctctcgcccttgatgccaacaaaaagaagagagccccagtacccgtcagagggggaccgaaatttgctgctaagccacataaccctggcttcggcatgggaggccccatgcacaacgaagtgcccccaccccccaaccttcgagggcggggaagaggcgggagcatccggggacgagggcgcgggcgaggatttggtggcgccaaccatggaggctacatgaatgccggtgctgggtatggaagctatgggtacggaggcaactcggcgacagcaggctacagtcagttctacagcaacggagggcattctgggaatgccagtggcggtggcggcgggggcggtggtggctcctccggctatggctcctactaccaaggtgacaactacaactcaccggtgcccccaaaacacgctgggaagaagcagccgcacgggggccagcagaagccctcctacggctcgggctaccagtcccaccagggccagcagcagtcctacaaccagagcccctacagcaactatggccctccacagggcaagcagaaaggctataaccatggacaaggcagctactcctactcgaactcctacaactctcccgggggcgggggcggatccgactacaactacgagagcaaattcaactacagtggtagtggaggccgaagcggcgggaacagctacggctcaggcggggcatcctacaacccagggtcacacgggggctacggcggaggttctgggggcggctcctcataccaaggcaaacaaggaggctactcacagtcgaactacaactccccggggtccggccagaactacagtggccctcccagctcctaccagtcctcacaaggcggctatggcagaaacgcagaccacagcatgaactaccagtacagataagcccccgcggggcggagatttctaccttctgcacttactccccatcagaagatcgagttttatgcatcacagttaacatgtcagctggccctccaggcccccgcccccatcccgtccacgttgctgtgtcgtgaggtgcagcgggtcaccctgtggcccgtcctgtgacccatatttagccgtgtttgggactccgtgtcttcaatggtttgttagttgccattacaactttgtctgggtagagtttttgagtttttgcagttcagtatccctctgtctattcacacttcgtgttagtggtaactcagtttgtctttaaatagttacagaagggatacgtcatttgttaatgcttttgtgaagtgagttaaacgagctttctgtattttaatgctttagtgtttcagttttataagtgaagattttattttaaaaaccagtgggaaagagtggggggtttctttttatgtctgggtcattcaggcagtacatctgaattaagctgaatgtagacaaataaagaaaaacaaaactgcgcccgtcttaggcctgggtgtctgacccaccagcagtgcaatgggcaggtttccccactctattcctgctcttgggaaagcagcgtgggccatcaggatggtccctggtccttagagagggtccagttcaggcttctagacattttactcatgctcagcgaaggctggttcctggtcccctgggctgtgtagacccggtgtcccaccaggctccaggctcccaccatctacagaggggcttacagcgcccattctggtcttggggaacccatcacaaaataggctttttctgctccccgattctggtgtagttctaagtacacagtgatgtcctctgtaggggcgtgcctgtggtggaacataacgcagttacaaaagaaagggcaggtgaggcctgggtaaccccagccatggaccgtcagtggctggagggagcttcgtgtctgtgctggagctgcagcctgctcgccatctggaggctcagtggagtggggagttggggttctcataccagcagatttccctagagcgtgattctcccatctgaggcaatcttgcctcccaggggaaattttgcaatgtttggaggatgttgtcacagctagtagcgggtgctctgggatctggtggatagatgccaaggatgctgtcaagcatactgtactgcccagaacagtggcccatagcagggacctgccctatcaaaatatcaggtgtatggaggtggagtcccaacgctagagcagcccttctcagctccaccctgcccggggagggaggaggagctctggtttcagagcagtgccgggattgcctttccccaggatctgtgtcggccatccaggaagaactgtactggccaagcctgggaccacacgtctgcagagatcctgctctgctggcctgagccccaggccttggcctcctgtgcttgggtaaccatggccactgggaaaagcaaggaccgtgtttgactttcttggagaggtgaaagaggtgaaagaacaagttgtgtgctagaaaacttttgaggaattcttatttgtgttagagcagaggaggtcccagataccaagtggcgcctcccaggaaaggctgggagaagaggtggcctggagtaccccgagatcccagcagcgcacacagtggagggatgaggatggatgggtcctaacccctgattttgatgggatgtgttcatgtcctatctcctctcctggacacattaaggggttgggacaagaagagactcctgtgagatcagcagacctcgtgtttaaggagagaatgcctgcctgcaacactcatggagagggacacttcctggccccacctgctaaatacctccaaactctgggcaggcgcctgcattctcaacacaggacttcccttaacagtttccggatcagtgaccaccaccacgttcaggtttctgaatgcagacccaccacgagggatggattccacccgcccgccctgctgcagatacatgcggcacagcaggcacgtgcctggagagaacagctcctgagcacagcacccttggagccctcaccccgctcacgatcctcaccagtgctgatgatgccgtcatgctgctggcctgagacagtatcccagctacaacaggacgacaccgggttcaggaatatgtggctatcaccttgagcactgacagtggccttccaggctagttgccttccaaacgcaggtagccgacctgcaggagggcctacaaacgggcccagcaagagctgggcaacagctggcttgtgaaatgagacaccttgaccaatatgctttgggtggacggtctcctacatgttcagtggaggccaccaggagcatccatgagcggggaaggggtccacacccttacatggcaagttgatacgatggggtgcttggtggatgggccatggaggtccgtgagctggaactgggcacacgccatcccagagggctcaggatgccccaggaaggaaagaagggcaacagactacacgattggacgtgtgtggttgactgggatgaagttggagggaggggcagggccttgcaggggattggtactgatcccagggaggaagtgttggggcttcatgaactaggatgaaaggaggcccctgagccatgacaaggggcacatccaggatttccgccaccctgaatttagtagagctagtaggccctggtcgtcactctgggcagggatgccgtcagccttgagggtcgccacccacctgtgtgttgccctctgtcctggcggggaaacatacaccccttgtctcaccaccaaccttgcttgtgtagtcagcagggctggccctgccccaaggactcactgcatgtacccggacccctaggcctggcctttgcagcatagttgggagcttctggattccatctgcacctgtgagccccatgctggctgtgcactgcgcgggcctgagactgctggatacaatgttgggcaacaactcagccagcctgatggcagcctcagaggcttactctaacccatcccagaataaatggagacttcatgtgttcatt

SEQ ID NO: 1262 - DNA, 2628 bp, Homo sapiens
agctgggctttgtggagcgctgcggagggtgcgtgcgggccgcggcagccgaacaaaggagcaggggcgccgccgcagggacccgccacccacctcccggggccgcgcagcggcctctcgtctactgccaccatgaccgccaacggcacagccgaggcggtgcagatccagttcggcctcatcaactgcggcaacaagtacctgacggccgaggcgttcgggttcaaggtgaacgcgtccgccagcagcctgaagaagaagcagatctggacgctggagcagccccctgacgaggcgggcagcgcggccgtgtgcctgcgcagccacctgggccgctacctggcggcggacaaggacggcaacgtgacctgcgagcgcgaggtgcccggtcccgactgccgtttcctcatcgtggcgcacgacgacggtcgctggtcgctgcagtccgaggcgcaccggcgctacttcggcggcaccgaggaccgcctgtcctgcttcgcgcagacggtgtcccccgccgagaagtggagcgtgcacatcgccatgcaccctcaggtcaacatctacagcgtcacccgtaagcgctacgcgcacctgagcgcgcggccggccgacgagatcgccgtggaccgcgacgtgccctggggcgtcgactcgctcatcaccctcgccttccaggaccagcgctacagcgtgcagaccgccgaccaccgcttcctgcgccacgacgggcgcctggtggcgcgccccgagccggccactggctacacgctggagttccgctccggcaaggtggccttccgcgactgcgagggccgttacctggcgccgtcggggcccagcggcacgctcaaggcgggcaaggccaccaaggtgggcaaggacgagctctttgctctggagcagagctgcgcccaggtcgtgctgcaggcggccaacgagaggaacgtgtccacgcgccagggtatggacctgtctgccaatcaggacgaggagaccgaccaggagaccttccagctggagatcgaccgcgacaccaaaaagtgtgccttccgtacccacacgggcaagtactggacgctgacggccaccgggggcgtgcagtccaccgcctccagcaagaatgccagctgctactttgacatcgagtggcgtgaccggcgcatcacactgagggcgtccaatggcaagtttgtgacctccaagaagaatgggcagctggccgcctcggtggagacagcagactccacaggcaaatactggacggtgggcagtgactccgcggtcaccagcagcggcgacactcctgtggacttcttcttcgagttctgcgactataacaaggtggccatcaaggtgggcgggcgctacctgaagggcgaccacgcaggcgtcctgaaggcctcggcggaaaccgtggaccccgcctcgctctgggagtactagggccggcccgtccttccccgcccctgcccacatggcggctcctgccaaccctccctgctaaccccttctccgccaggtgggctccagggcgggaggcaagcccccttgcctttcaaactggaaaccccagagaaaacggtgcccccacctgtcgcccctatggactccccactctcccctccgcccgggttccctactcccctcgggtcagcggctgcggcctggccctgggagggatttcagatgcccctgccctcttgtctgccacggggcgagtctggcacctctttcttctgacctcagacggctctgagccttatttctctggaagcggctaagggacggttgggggctgggagccctgggcgtgtagtgtaactggaatcttttgcctctcccagccacctcctcccagccccccaggagagctgggcacatgtcccaagcctgtcagtggccctccctggtgcactgtccccgaaacccctgcttgggaagggaagctgtcgggtgggctaggactgacccttgtggtgtttttttgggtggtggctggaaacagcccctctcccacgtggcagaggctcagcctggctcccttccctggagcggcagggcgtgacggccacagggtctgcccgctgcacgttctgccaaggtggtggtggcgggcgggtaggggtgtgggggccgtcttcctcctgtctctttcctttcaccctagcctgactggaagcagaaaatgaccaaatcagtattttttttaatgaaatattattgctggaggcgtcccaggcaagcctggctgtagtagcgagtgatctggcggggggcgtctcagcaccctccccagggggtgcatctcagccccctctttccgtccttcccgtccagccccagccctgggcctgggctgccgacacctgggccagagcccctgctgtgattggtgctccctgggcctcccgggtggatgaagccaggcgtcgccccctccgggagccctggggtgagccgccggggcccccctgctgccagcctcccccgtccccaacatgcatctcactctgggtgtcttggtcttttattttttgtaagtgtcatttgtataactctaaacgcccatgatagtagcttcaaactggaaatagcgaaataaaataactcagtctgcagccccag

SEQ ID NO: 1263 - DNA, 2800 bp, Homo sapiens
agctgggctttgtggagcgctgcggagggtgcgtgcgggccgcggcagccgaacaaaggagcaggggcgccgccgcagggacccgccacccacctcccggggccgcgcagcggcctctcgtctactgccaccatgaccgccaacggcacagccgaggcggtgcagatccagttcggcctcatcaactgcggcaacaagtacctgacggccgaggcgttcgggttcaaggtgaacgcgtccgccagcagcctgaagaagaagcagatctggacgctggagcagccccctgacgaggcgggcagcgcggccgtgtgcctgcgcagccacctgggccgctacctggcggcggacaaggacggcaacgtgacctgcgagcgcgaggtgcccggtcccgactgccgtttcctcatcgtggcgcacgacgacggtcgctggtcgctgcagtccgaggcgcaccggcgctacttcggcggcaccgaggaccgcctgtcctgcttcgcgcagacggtgtcccccgccgagaagtggagcgtgcacatcgccatgcaccctcaggtcaacatctacagcgtcacccgtaagcgctacgcgcacctgagcgcgcggccggccgacgagatcgccgtggaccgcgacgtgccctggggcgtcgactcgctcatcaccctcgccttccaggaccagcgctacagcgtgcagaccgccgaccaccgcttcctgcgccacgacgggcgcctggtggcgcgccccgagccggccactggctacacgctggagttccgctccggcaaggtggccttccgcgactgcgagggccgttacctggcgccgtcggggcccagcggcacgctcaaggcgggcaaggccaccaaggtgggcaaggacgagctctttgctctggagcagagctgcgcccaggtcgtgctgcaggcggccaacgagaggaacgtgtccacgcgccagggtatggacctgtctgccaatcaggacgaggagaccgaccaggagaccttccagctggagatcgaccgcgacaccaaaaagtgtgccttccgtacccacacgggcaagtactggacgctgacggccaccgggggcgtgcagtccaccgcctccagcaagaatgccagctgctactttgacatcgagtggcgtgaccggcgcatcacactgagggcgtccaatggcaagtttgtgacctccaagaagaatgggcagctggccgcctcggtggagacagcaggggactcagagctcttcctcatgaagctcatcaaccgccccatcatcgtgttccgcggggagcatggcttcatcggctgccgcaaggtcacgggcaccctggacgccaaccgctccagctatgacgtcttccagctggagttcaacgatggcgcctacaacatcaaaggcagactccacaggcaaatactggacggtgggcagtgactccgcggtcaccagcagcggcgacactcctgtggacttcttcttcgagttctgcgactataacaaggtggccatcaaggtgggcgggcgctacctgaagggcgaccacgcaggcgtcctgaaggcctcggcggaaaccgtggaccccgcctcgctctgggagtactagggccggcccgtccttccccgcccctgcccacatggcggctcctgccaaccctccctgctaaccccttctccgccaggtgggctccagggcgggaggcaagcccccttgcctttcaaactggaaaccccagagaaaacggtgcccccacctgtcgcccctatggactccccactctcccctccgcccgggttccctactcccctcgggtcagcggctgcggcctggccctgggagggatttcagatgcccctgccctcttgtctgccacggggcgagtctggcacctctttcttctgacctcagacggctctgagccttatttctctggaagcggctaagggacggttgggggctgggagccctgggcgtgtagtgtaactggaatcttttgcctctcccagccacctcctcccagccccccaggagagctgggcacatgtcccaagcctgtcagtggccctccctggtgcactgtccccgaaacccctgcttgggaagggaagctgtcgggtgggctaggactgacccttgtggtgtttttttgggtggtggctggaaacagcccctctcccacgtggcagaggctcagcctggctcccttccctggagcggcagggcgtgacggccacagggtctgcccgctgcacgttctgccaaggtggtggtggcgggcgggtaggggtgtgggggccgtcttcctcctgtctctttcctttcaccctagcctgactggaagcagaaaatgaccaaatcagtattttttttaatgaaatattattgctggaggcgtcccaggcaagcctggctgtagtagcgagtgatctggcggggggcgtctcagcaccctccccagggggtgcatctcagccccctctttccgtccttcccgtccagccccagccctgggcctgggctgccgacacctgggccagagcccctgctgtgattggtgctccctgggcctcccgggtggatgaagccaggcgtcgccccctccgggagccctggggtgagccgccggggcccccctgctgccagcctcccccgtccccaacatgcatctcactctgggtgtcttggtcttttattttttgtaagtgtcatttgtataactctaaacgcccatgatagtagcttcaaactggaaatagcgaaataaaataactcagtctgcagccccag

SEQ ID NO: 1264 - DNA, 2616 bp, Homo sapiens
ggtggagcgctgcgggaggtgcgtgcgcgccccggccgccgaacaaaggagcaggggcgccgccgcggggacccgccacccacctcccggggccgcgccgcggcctcccgtccaccgccaccatgaccgccaacggcacagccgaggcggtgcagatccggttcggcctcatcaactgcggcaacaagtacctgagggcggaggcgttcgggttcaaggttaacgcgtcggccagcagcctgaagaagcagcagatctggacgctggagcagccccctgactaggcgggcagcgcggccgtgtgcctgcgcagccacctgggccgctacctggcggcggacaaggacggcaatgtgacctgcgagcgcgaggtgcccggtcccgactgccgcttcctcaccgtggcgcacgacgacggccgctggtcgctgcagtccgaggcgcaccggcgctccttcggcggcacggaggaccgcctgtcgtgcttcgcgcagacggtgtcccccgccgagaagtggagcgtgcacatcgccatgcaccctcaggtcaacatctaccgcgtcacccctaagcgctaggcgcacctgagcgcgccgccggccgacgagatcgcagtggaccgcgacgtgccctggggcgtcgactcgctcgtcaccctcgccttccaggagcagcgctacagcgtgcagaccgcggaccaccgcttcctgcgccatgacaggcgcctggtggcgcgccccgagccggccactggctacacgctgcagttccgctccggcaatgtggccttccgcgactgcgagggccgttacctggcgccgtcggggcccagcggcacgctcaaggcgggcaaggccaccaaggtgggcaaggacgagctctttgccctggagcagagctgcgcccaggtcgtgctgcaggcggccaacgggaggaatgtgtccacgcgccagggtatggacctgtctgccaatccggacgaggagaccgaccaggagaccttccagctggagatcgaccgcgacaacaacaagtgtgccttctgtacccacaggggcaagtactggacgctgacggccactgggggcgtgcagtccaccgcctccaccaagaatgccagctgctacttcgacattgagcggcgtgaccggcgcatcacactgcgggcgtccaatggcaagtttgtgacatctaagaagaatgggcagctggccgcctcggtggagacagcaggggatccacaggcaaatactggacggtgggcagtgactccgcggtcaccagcagcggcgacactcctgtggacttcttcttcgagttctgcgactacaacaaggaggccatcaagatggacgggcgctacctgaagggcgaccacgcaggggtcctaagggcctccgcggagaccgtgcaccccgcctcgctctgggagtactagggcccgcccgcccttcccggttcctgcccacgtggcggctccttccaaccctccctgctaaccccttctcctccaggtgggctcccccgggcgggaggcaagcccccttgcctttcaaactggaaaccccagagaaaacggtgcccccacctgtcgcccctatggacttcccagtctcccctccgccctggttccctactcccctcgggtcagcggctgcggcctggccctgggagggatttcagatgcccctgccctcttgtctgccacggggcgagtctggcacctctttcttctgacctcagacggctctgagccttatttctctggaagcggctaagggacggttgggggctgggagccctgggcgtgtagtgtaactggaatctcttgcccctcccagccacctcctcccagccccccaggagctgggcacgtgtcccaagcctgtcagtggccctccctggtgcactgtcccgaaacccctgcttgggaagggaagccgtcaggtgggcgaggactgagcctcggtgtttttttgggtggtggctggaaacagcccctctcccacgtggcagaggctcagcctggctcccttccctggagcggcagggtgtgacggccacagggtctgcccgctgcatgttctgccagggtggtggtggcgggggggtaggggtgtgggggccgtcttcctcctctttcctttcaccctagcctgaccggaagcagaaaatgaccaaatcggtatttttttttaatgaaatattattgctggaggcgtcccaggcaagcctggctgtagtagtgagtgatgtgggtggggcgtctcagcaccctccccagggggtgcatctcagccccctctttccgtccttccggtccagccccagccctgggcctgggctgcggatgcctgggccagagcccccgctgtgattggtgcttcctgggcctcctgggtggatgaagccaggcgtcgccccctcggggagccctggggtgagccgccagggcccccctgctgccagtctcccccgtcccgtccccgacatgcatctcactctgggtgtcctggtcttttattttttgtaagtgtcatttgtataactccaaacgcccatgatagtagcttcaaactggaaatagtgaaataaaataactcagtctgcagctcc

SEQ ID NO: 1265 - DNA, 2781 bp, Homo sapiens
ggtggagcgctgcgggaggtgcgtgcgcgccccggccgccgaacaaaggagcaggggcgccgccgcggggacccgccacccacctcccggggccgcgccgcggcctcccgtccaccgccaccatgaccgccaacggcacagccgaggcggtgcagatccggttcggcctcatcaactgcggcaacaagtacctgagggcggaggcgttcgggttcaaggttaacgcgtcggccagcagcctgaagaagcagcagatctggacgctggagcagccccctgactaggcgggcagcgcggccgtgtgcctgcgcagccacctgggccgctacctggcggcggacaaggacggcaatgtgacctgcgagcgcgaggtgcccggtcccgactgccgcttcctcaccgtggcgcacgacgacggccgctggtcgctgcagtccgaggcgcaccggcgctccttcggcggcacggaggaccgcctgtcgtgcttcgcgcagacggtgtcccccgccgagaagtggagcgtgcacatcgccatgcaccctcaggtcaacatctaccgcgtcacccctaagcgctaggcgcacctgagcgcgccgccggccgacgagatcgcagtggaccgcgacgtgccctggggcgtcgactcgctcgtcaccctcgccttccaggagcagcgctacagcgtgcagaccgcggaccaccgcttcctgcgccatgacaggcgcctggtggcgcgccccgagccggccactggctacacgctgcagttccgctccggcaatgtggccttccgcgactgcgagggccgttacctggcgccgtcggggcccagcggcacgctcaaggcgggcaaggccaccaaggtgggcaaggacgagctctttgccctggagcagagctgcgcccaggtcgtgctgcaggcggccaacgggaggaatgtgtccacgcgccagggtatggacctgtctgccaatccggacgaggagaccgaccaggagaccttccagctggagatcgaccgcgacaacaacaagtgtgccttctgtacccacaggggcaagtactggacgctgacggccactgggggcgtgcagtccaccgcctccaccaagaatgccagctgctacttcgacattgagcggcgtgaccggcgcatcacactgcgggcgtccaatggcaagtttgtgacatctaagaagaatgggcagctggccgcctcggtggagacagcaggggactcagagctcttcctcatgaagttcatcaaccgcgccatcaccgtgttgcgcggggagcacggctttatcggctgccgcaaggtcggggcaccctggacgccaaccgctgcagctatgacgtcttccagctggagttcaacaatggtacctacaacatcaaagactccacaggcaaatactggacggtgggcagtgactccgcggtcaccagcagcggcgacactcctgtggacttcttcttcgagttctgcgactacaacaaggaggccatcaagatggacgggcgctacctgaagggcgaccacgcaggggtcctaagggcctccgcggagaccgtgcaccccgcctcgctctgggagtactagggcccgcccgcccttcccggttcctgcccacgtggcggctccttccaaccctccctgctaaccccttctcctccaggtgggctcccccgggcgggaggcaagcccccttgcctttcaaactggaaaccccagagaaaacggtgcccccacctgtcgcccctatggacttcccagtctcccctccgccctggttccctactcccctcgggtcagcggctgcggcctggccctgggagggatttcagatgcccctgccctcttgtctgccacggggcgagtctggcacctctttcttctgacctcagacggctctgagccttatttctctggaagcggctaagggacggttgggggctgggagccctgggcgtgtagtgtaactggaatctcttgcccctcccagccacctcctcccagccccccaggagctgggcacgtgtcccaagcctgtcagtggccctccctggtgcactgtcccgaaacccctgcttgggaagggaagccgtcaggtgggcgaggactgagcctcggtgtttttttgggtggtggctggaaacagcccctctcccacgtggcagaggctcagcctggctcccttccctggagcggcagggtgtgacggccacagggtctgcccgctgcatgttctgccagggtggtggtggcgggggggtaggggtgtgggggccgtcttcctcctctttcctttcaccctagcctgaccggaagcagaaaatgaccaaatcggtatttttttttaatgaaatattattgctggaggcgtcccaggcaagcctggctgtagtagtgagtgatgtgggtggggcgtctcagcaccctccccagggggtgcatctcagccccctctttccgtccttccggtccagccccagccctgggcctgggctgcggatgcctgggccagagcccccgctgtgattggtgcttcctgggcctcctgggtggatgaagccaggcgtcgccccctcggggagccctggggtgagccgccagggcccccctgctgccagtctcccccgtcccgtccccgacatgcatctcactctgggtgtcctggtcttttattttttgtaagtgtcatttgtataactccaaacgcccatgatagtagcttcaaactggaaatagtgaaataaaataactcagtctgcagctcc

SEQ ID NO: 1266 - DNA, 2390 bp, Homo sapiens
gcggagggtgcgtgcgggccgcggcagccgaacaaaggagcaggggcgccgccgcagggacccgccacccacctcccggggccgcgcagcggcctctcgtctactgccaccatgaccgccaacggcacagccgaggcggtgcagatccagttcggcctcatcaactgcggcaacaagtacctgacggccgaggcgttcgggttcaaggtgaacgcgtccgccagcagcctgaagaagaagcagatctggacgctggagcagccccctgacgaggcgggcagcgcggccgtgtgcctgcgcagccacctgggccgctacctggcggcggacaaggacggcaacgtgacctgcgagcgcgaggtgcccggtcccgactgccgtttcctcatcgtggcgcacgacgacggtcgctggtcgctgcagtccgaggcgcaccggcgctacttcggcggcaccgaggaccgcctgtcctgcttcgcgcagacggtgtcccccgccgagaagtggagcgtgcacatcgccatgcaccctcaggtcaacatctacagcgtcacccgtaagcgctacgcgcacctgagcgcgcggccggccgacgagatcgccgtggaccgcgacgtgccctggggcgtcgactcgctcatcaccctcgccttccaggaccagcgctacagcgtgcagaccgccgaccaccgcttcctgcgccacgacgggcgcctggtggcgcgccccgagccggccactggctacacgctggagttccgctccggcaaggtggccttccgcgactgcgagggccgttacctggcgccgtcggggcccagcggcacgctcaaggcgggcaaggccaccaaggtgggcaaggacgagctctttgctctggagcagagctgcgcccaggtcgtgctgcaggcggccaacgagaggaacgtgtccacgcgccagggtatggacctgtctgccaatcaggacgaggagaccgaccaggagaccttccagctggagatcgaccgcgacaccaaaaagtgtgccttccgtacccacacgggcaagtactggacgctgacggccaccgggggcgtgcagtccaccgcctccagcaagaatgccagctgctactttgacatcgagtggcgtgaccggcgcatcacactgagggcgtccaatggcaagtttgtgacctccaagaagaatgggcagctggccgcctcggtggagacagcaggggactcagagctcttcctcatgaagctcatcaaccgccccatcatcgtgttccgcggggagcatggcttcatcggctgccgcaaggtcacgggcaccctggacgccaaccgctccagctatgacgtcttccagctggagttcaacgatggcgcctacaacatcaaagactccacaggcaaatactggacggtgggcagtgactccgcggtcaccagcagcggcgacactcctgtggacttcttcttcgagttctgcgactataacaaggtggccatcaaggtgggcgggcgctacctgaagggcgaccacgcaggcgtcctgaaggcctcggcggaaaccgtggaccccgcctcgctctgggagtactagggccggcccgtccttccccgcccctgcccacatggcggctcctgccaaccctccctgctaaccccttctccgccaggtgggctccagggcgggaggcaagcccccttgcctttcaaactggaaaccccagagaaaacggtgcccccacctgtcgcccctatggactccccactctcccctccgcccgggttccctactcccctcgggtcagcggctgcggcctggccctgggagggatttcagatgcccctgccctcttgtctgccacggggcgagtctggcacctctttcttctgacctcagacggctctgagccttatttctctggaagcggctaagggacggttgggggctgggagccctgggcgtgtagtgtaactggaatcttttgcctctcccagccacctcctcccagccccccaggagagctgggcacatgtcccaagcctgtcagtggccctccctggtgcactgtccccgaaacccctgcttgggaagggaagctgtcgggtgggctaggactgacccttgtggtgtttttttgggtggtggctggaaacagcccctctcccgggtggatgaagccaggcgtcgccccctccgggagccctggggtgagccgccggggcccccctgctgccagcctcccccgtccccaacatgcatctcactctgggtgtcttggtcttttattttttgtaagtgtcatttgtataactctaaacgcccatgatagtagcttcaaactggaaatagcgaaataaaataactcagtctgcaaaaaaaaaaaaaaaaaa

SEQ ID NO: 1267 - DNA, 2796 bp, Homo sapiens
agctgggctttgtggagcgctgcggagggtgcgtgcgggccgcggcagccgaacaaaggagcaggggcgccgccgcagggacccgccacccacctcccggggccgcgcagcggcctctcgtctactgccaccatgaccgccaacggcacagccgaggcggtgcagatccagttcggcctcatcaactgcggcaacaagtacctgacggccgaggcgttcgggttcaaggtgaacgcgtccgccagcagcctgaagaagaagcagatctggacgctggagcagccccctgacgaggcgggcagcgcggccgtgtgcctgcgcagccacctgggccgctacctggcggcggacaaggacggcaacgtgacctgcgagcgcgaggtgcccggtcccgactgccgtttcctcatcgtggcgcacgacgacggtcgctggtcgctgcagtccgaggcgcaccggcgctacttcggcggcaccgaggaccgcctgtcctgcttcgcgcagacggtgtcccccgccgagaagtggagcgtgcacatcgccatgcaccctcaggtcaacatctacagcgtcacccgtaagcgctacgcgcacctgagcgcgcggccggccgacgagatcgccgtggaccgcgacgtgccctggggcgtcgactcgctcatcaccctcgccttccaggaccagcgctacagcgtgcagaccgccgaccaccgcttcctgcgccacgacgggcgcctggtggcgcgccccgagccggccactggctacacgctggagttccgctccggcaaggtggccttccgcgactgcgagggccgttacctggcgccgtcggggcccagcggcacgctcaaggcgggcaaggccaccaaggtgggcaaggacgagctctttgctctggagcagagctgcgcccaggtcgtgctgcaggcggccaacgagaggaacgtgtccacgcgccagggtatggacctgtctgccaatcaggacgaggagaccgaccaggagaccttccagctggagatcgaccgcgacaccaaaaagtgtgccttccgtacccacacgggcaagtactggacgctgacggccaccgggggcgtgcagtccaccgcctccagcaagaatgccagctgctactttgacatcgagtggcgtgaccggcgcatcacactgagggcgtccaatggcaagtttgtgacctccaagaagaatgggcagctggccgcctcggtggagacagcaggggactcagagctcttcctcatgaagctcatcaaccgccccatcatcgtgttccgcggggagcatggcttcatcggctgccgcaaggtcacgggcaccctggacgccaaccgctccagctatgacgtcttccagctggagttcaacgatggcgcctacaacatcaaagactccacaggcaaatactggacggtgggcagtgactccgcggtcaccagcagcggcgacactcctgtggacttcttcttcgagttctgcgactataacaaggtggccatcaaggtgggcgggcgctacctgaagggcgaccacgcaggcgtcctgaaggcctcggcggaaaccgtggaccccgcctcgctctgggagtactagggccggcccgtccttccccgcccctgcccacatggcggctcctgccaaccctccctgctaaccccttctccgccaggtgggctccagggcgggaggcaagcccccttgcctttcaaactggaaaccccagagaaaacggtgcccccacctgtcgcccctatggactccccactctcccctccgcccgggttccctactcccctcgggtcagcggctgcggcctggccctgggagggatttcagatgcccctgccctcttgtctgccacggggcgagtctggcacctctttcttctgacctcagacggctctgagccttatttctctggaagcggctaagggacggttgggggctgggagccctgggcgtgtagtgtaactggaatcttttgcctctcccagccacctcctcccagccccccaggagagctgggcacatgtcccaagcctgtcagtggccctccctggtgcactgtccccgaaacccctgcttgggaagggaagctgtcgggtgggctaggactgacccttgtggtgtttttttgggtggtggctggaaacagcccctctcccacgtggcagaggctcagcctggctcccttccctggagcggcagggcgtgacggccacagggtctgcccgctgcacgttctgccaaggtggtggtggcgggcgggtaggggtgtgggggccgtcttcctcctgtctctttcctttcaccctagcctgactggaagcagaaaatgaccaaatcagtattttttttaatgaaatattattgctggaggcgtcccaggcaagcctggctgtagtagcgagtgatctggcggggggcgtctcagcaccctccccagggggtgcatctcagccccctctttccgtccttcccgtccagccccagccctgggcctgggctgccgacacctgggccagagcccctgctgtgattggtgctccctgggcctcccgggtggatgaagccaggcgtcgccccctccgggagccctggggtgagccgccggggcccccctgctgccagcctcccccgtccccaacatgcatctcactctgggtgtcttggtcttttattttttgtaagtgtcatttgtataactctaaacgcccatgatagtagcttcaaactggaaatagcgaaataaaataactcagtctgcagccccag

SEQ ID NO: 1268 - DNA, 1237 bp, Homo sapiens
gccgagaggagaggagaatggcggcggaaggctggatttggcgttggggctggggccggcggtgcctgggaaggcctgggcttctcggccccggccctggccccactacacctctctttcttcttttgttgttggggtctgtgactgcggatataactgacggcaacagtgaacatctcaagcgggagcattcgctcattaagccctaccaaggggtcggttccagctctatgcccctctgggacttccagggcagcactatgctcacgagccagtacgtacgtctgacccctgacgagcgcagcaaagagggctctatctggaaccaccagccgtgcttcctcaaagactgggaaatgcacgtccacttcaaagtccacggcacagggaagaagaacctccatggagacggcatcgccttgtggtacacccgggaccgcctcgtgccagggcctgtgtttggaagcaaagataacttccacggcttagccatcttcctggacacctaccccaatgatgagaccactgagcgcgtgttcccgtacatctcggtgatggtgaacaatggctccctgtcctacgaccacagcaaggatgggcgctggaccgagctggcgggctgcacggctgacttccgcaaccgcgatcacgacaccttcctggctgtgcgctactcccggggccgtctgacggtgatgaccgacctggaggacaagaacgagtggaagaactgcattgacatcacgggagtgcgcctgcccaccggctactacttcggggcctccgccggcaccggcgacctgtctgacaatcatgacatcatctccatgaagctgttccagctgatggtggagcacacgcccgacgaggagagcatcgactggaccaagatcgagcccagcgtcaacttcctcaagtcgcccaaagacaacgtggacgaccccacggggaacttccgcagcgggcccctgacggggtggcgggtgttcctgctgctgctgtgcgctctcctgggcatcgttgtctgcgccgtggtgggggccgtggtgttccagaagcggcaggagcggaacaagcgcttctactgagtggcgcctccggcggggcctgtccctgggcccaggagccaatgtgaacttttttttttaccgggattataaaagaacaacaagatgaccttatttcttaactgtttcaaataaatgattaaagtattttcaaaaaaaaaaaaaaaaaa

SEQ ID NO: 1269 - DNA, 1238 bp, Homo sapiens
ttggggtctgtgactgcggatataactgacgacggcatcgccttgtggtacacccgggaccgcctcgtgccagggcctgtgtttggaagcaaagataacttccacggcttagccatcttcctggacacctaccccaatgatgagaccactgagcgcgtgttcccgtacatctcggtgatggtgaacaatggctccctgtcctacgaccacagcaaggatgggcgctggaccgagctggcgggctgcacggctgacttccgcaaccgcgatcacgacaccttcctggctgtgcgctactcccggggccgtctgacggtgatgaccgacctggaggacaagaacgagtggaagaactgcattgacatcacgggagtgcgcctgcccaccggctactacttcggggcctccgccggcaccggcgacctgtctgacaatcatgacatcatctccatgaagctgttccagctgatggtggagcacacgcccgacgaggagagcatcgactggaccaagatcgagcccagcgtcaacttcctcaagtcgcccaaagacaacgtggacgaccccacggggaacttccgcagcgggcccctgacggggtggcgggtgttcctgctgctgctgtgcgctctcctgggcatcgttgtctgcgccgtggtgggggccgtggtgttccagaagcggcaggagcggaacaagcgcttctactgagtggcgcctccggcggggcctgtccctgggcccaggagccaatgtgaacttttttttttaccgggattataaaagaacaacaagatgaccttatttcttaactgtttcaaataaatgattaaagtattttcatacattttgcttcttgcccagcagggacaggtggcagagccgaggcttagggtctggcaccccccacagctggagacggaggctctcctggggctggtgtctcaggagcaggggtctgtgtctacagatgggctgtggcccctgcaggcagctgttgaacactggagggtcccccggaccacactggggtgggctcctgaggacgtggggaagtgattttgttttgtggtgtgtggcacgtgtggcgacggataaggcctgaactgggaaacccaggccttcctgttcaccctgagctgcttcctgagacagatgctcaagtgaggctgcaggcgcggtgtggtggggccgagtgtgaccgtttgctaaataaagtgaaatacccaacctcagcc

SEQ ID NO: 1270 - DNA, 1806 bp, Homo sapiens
tgccttggagcctctaaggagatgaaactgcactcaaccaggatgagaggctgcccggccaatgcagctgccgccccgtctgctgcggaggctttgctttttgactccctggcgacagtaaagttgaagagcttccggccggaggccaatagatgggacccccggaaggcggaagttctagggcggaagtggccgagaggagaggagaatggcggcggaaggctggatttggcgttggggctggggccggcggtgcctgggaaggcctgggcttctcggccccggccctggccccactacacctctctttcttcttttgttgttggggtctgtgactgcggatataactgacggcaacagtgaacatctcaagcgggagcattcgctcattaagccctaccaaggggtcggttccagctctatgcccctctgggacttccagggcagcactatgctcacgagccagtacgtacgtctgacccctgacgagcgcagcaaagagggctctatctggaaccaccagccgtgcttcctcaaagactgggaaatgcacgtccacttcaaagtccacggcacagggaagaagaacctccatggagacggcatcgccttgtggtacacccgggaccgcctcgtgccagggcctgtgtttggaagcaaagataacttccacggcttagccatcttcctggacacctaccccaatgatgagaccactgagcgcgtgttcccgtacatctcggtgatggtgaacaatggctccctgtcctacgaccacagcaaggatgggcgctggaccgagctggcgggctgcacggctgacttccgcaaccgcgatcacgacaccttcctggctgtgcgctactcccggggccgtctgacggtgatgaccgacctggaggacaagaacgagtggaagaactgcattgacatcacgggagtgcgcctgcccaccggctactacttcggggcctccgccggcaccggcgacctgtctgacaatcatgacatcatctccatgaagctgttccagctgatggtggagcacacgcccgacgaggagagcatcgactggaccaagatcgagcccagcgtcaacttcctcaagtcgcccaaagacaacgtggacgaccccacggggaacttccgcagcgggcccctgacggggtggcgggtgttcctgctgctgctgtgcgctctcctgggcatcgttgtctgcgccgtggtgggggccgtggtgttccagaagcggcaggagcggaacaagcgcttctactgagtggcgcctccggcggggcctgtccctgggcccaggagccaatgtgaacttttttttttaccgggattataaaagaacaacaagatgaccttatttcttaactgtttcaaataaatgattaaagtattttcatacattttgcttcttgcccagcagggacaggtggcagagccgaggcttagggtctggcaccccccacagctggagacggaggctctcctggggctggtgtctcaggagcaggggtctgtgtctacagatgggctgtggcccctgcaggcagctgttgaacactggagggtcccccggaccacactggggtgggctcctgaggacgtggggaagtgattttgttttgtggtgtgtggcacgtgtggcgacggataaggcctgaactgggaaacccaggccttcctgttcaccctgagctgcttcctgagacagatgctcaagtgaggctgcaggcgcggtgtggtggggccgagtgtgaccgtttgctaaataaagtgaaatacccaacctcagcc

SEQ ID NO: 1271 - DNA, 2884 bp, Homo sapiens
tcgattctcaagagggtttcattggtctcaacctggccccccaggcaacccacccctgattggacagtctcatcaagaaggttggtcaagagctcaagtgtttctgagaatctgggtgatttataagaaacccttagctgaatgcagggtggggagaacgaaagacaaaagcatcttttttcagaagggaaactgaaagaaagaggggaagagtattaaagaccatttctggctgggcagggcactctcagcagctcaactgcccagcgtgaccagtggccacctctgcagtgtcttccacaacctggtcttgactcgtctgctgaacaaatcctctgacctcaggccggctgtgaacgtagttcctgagagatagcaaacatgcccaacagtgagcccgcatctctgctggagctgttcaacagcatcgccacacaaggggagctcgtaaggtccctcaaagcgggaaatgcgtcaaaggatgaaattgattctgcagtaaagatgttggtgtcattaaaaatgagctacaaagctgccgcgggggaggattacaaggctgactgtcctccagggaacccagcacctaccagtaatcatggcccagatgccacagaagctgaagaggattttgtggacccatggacagtacagacaagcagtgcaaaaggcatagactacgataagctcattgttcggtttggaagtagtaaaattgacaaagagctaataaaccgaatagagagagccaccggccaaagaccacaccacttcctgcgcagaggcatcttcttctcacacagagatatgaatcaggttcttgatgcctatgaaaataagaagccattttatctgtacacgggccggggcccctcttctgaagcaatgcatgtaggtcacctcattccatttattttcacaaagtggctccaggatgtatttaacgtgcccttggtcatccagatgacggatgacgagaagtatctgtggaaggacctgaccctggaccaggcctatagctatgctgtggagaatgccaaggacatcatcgcctgtggctttgacatcaacaagactttcatattctctgacctggactacatggggatgagctcaggtttctacaaaaatgtggtgaagattcaaaagcatgttaccttcaaccaagtgaaaggcattttcggcttcactgacagcgactgcattgggaagatcagttttcctgccatccaggctgctccctccttcagcaactcattcccacagatcttccgagacaggacggatatccagtgccttatcccatgtgccattgaccaggatccttactttagaatgacaagggacgtcgcccccaggatcggctatcctaaaccagccctgctgcactccaccttcttcccagccctgcagggcgcccagaccaaaatgagtgccagcgaccccaactcctccatcttcctcaccgacacggccaagcagatcaaaaccaaggtcaataagcatgcgttttctggagggagagacaccatcgaggagcacaggcagtttgggggcaactgtgatgtggacgtgtctttcatgtacctgaccttcttcctcgaggacgacgacaagctcgagcagatcaggaaggattacaccagcggagccatgctcaccggtgagctcaagaaggcactcatagaggttctgcagcccttgatcgcagagcaccaggcccggcgcaaggaggtcacggatgagatagtgaaagagttcatgactccccggaagctgtccttcgactttcagtagcactcgttttacatatgcttataaaagaagtgatgtatcagtaatgtatcaataatcccagcccagtcaaagcaccgccacctgtaggcttctgtctcatggtaattactgggcctggcctctgtaagcctgtgtatgttatcaatactgtttcttcctgtgagttccattatttctatctcttatgggcaaagcattgtgggtaattggtgctggctaacattgcatggtcggatagagaagtccagctgtgagtctctccccaaagcagccccacagtggagcctttggctggaagtccatgggccaccctgttcttgtccatggaggactccgagggttccaagtatactcttaagacccactctgtttaaaaatatatattctatgtatgcgtatatggaattgaaatgtcattattgtaacctagaaagtgctttgaaatattgatgtggggaggtttattgagcacaagatgtatttcagcccatgccccctcccaaaaagaaattgataagtaaaagcttcgttatacatttgactaagaaatcacccagctttaaagctgcttttaacaatgaagattgaacagagttcagcaattttgattaaattaagacttgggggtgaaactttccagtttactgaactccagaccatgcatgtagtccactccagaaatcatgctcgcttcccttggcacaccagtgttctcctgccaaatgaccctagaccctctgtcctgcagagtcagggtggcttttcccctgactgtgtccgatgccaaggagtcctggcctccgcagatgcttcattttgacccttggctgcagtggaagtcagcacagagcagtgccctggctgtgtccctggacgggtggacttagctagggagaaagtcgaggcagcagccctcgaggccctcacagatgtctaggcaggcctcatttcatcacgcagcatgtgcaggcctggaagagcaaagccaaatctcagggaagtccttggttgatgtatctgggtctcctctggagcactctgccctcctgtcacccagtagagtaaataaacttccttggctcctgct

SEQ ID NO: 1272 - DNA, 3030 bp, Homo sapiens
caatgaccagctaatggctcgattctcaagagggtttcattggtctcaacctggccccccaggcaacccacccctgattggacagtctcatcaagaaggttggtcaagagctcaagtgtttctgagaatctgggtgatttataagaaacccttagctgaatgcagggtggggagaacgaaagacaaaagcatcttttttcagaagggaaactgaaagaaagaggggaagagtattaaagaccatttctggctgggcagggcactctcagcagctcaactgcccagcgtgaccagtggccacctctgcagtgtcttccacaacctggagtgtagtatttgttaaacaggtgaatctacttctcttaacaaagtctcaatgtcctatttgcaatttatgtggtaaacactgaagacaatggtccttaaccttttggcatctcagcctcctttcgaaagtcttgactcgtctgctgaacaaatcctctgacctcaggccggctgtgaacgtagttcctgagagatagcaaacatgcccaacagtgagcccgcatctctgctggagctgttcaacagcatcgccacacaaggggagctcgtaaggtccctcaaagcgggaaatgcgtcaaaggatgaaattgattctgcagtaaagatgttggtgtcattaaaaatgagctacaaagctgccgcgggggaggattacaaggctgactgtcctccagggaacccagcacctaccagtaatcatggcccagatgccacagaagctgaagaggattttgtggacccatggacagtacagacaagcagtgcaaaaggcatagactacgataagctcattgttcggtttggaagtagtaaaattgacaaagagctaataaaccgaatagagagagccaccggccaaagaccacaccacttcctgcgcagaggcatcttcttctcacacagagatatgaatcaggttcttgatgcctatgaaaataagaagccattttatctgtacacgggccggggcccctcttctgaagcaatgcatgtaggtcacctcattccatttattttcacaaagtggctccaggatgtatttaacgtgcccttggtcatccagatgacggatgacgagaagtatctgtggaaggacctgaccctggaccaggcctatagctatgctgtggagaatgccaaggacatcatcgcctgtggctttgacatcaacaagactttcatattctctgacctggactacatggggatgagctcaggtttctacaaaaatgtggtgaagattcaaaagcatgttaccttcaaccaagtgaaaggcattttcggcttcactgacagcgactgcattgggaagatcagttttcctgccatccaggctgctccctccttcagcaactcattcccacagatcttccgagacaggacggatatccagtgccttatcccatgtgccattgaccaggatccttactttagaatgacaagggacgtcgcccccaggatcggctatcctaaaccagccctgctgcactccaccttcttcccagccctgcagggcgcccagaccaaaatgagtgccagcgaccccaactcctccatcttcctcaccgacacggccaagcagatcaaaaccaaggtcaataagcatgcgttttctggagggagagacaccatcgaggagcacaggcagtttgggggcaactgtgatgtggacgtgtctttcatgtacctgaccttcttcctcgaggacgacgacaagctcgagcagatcaggaaggattacaccagcggagccatgctcaccggtgagctcaagaaggcactcatagaggttctgcagcccttgatcgcagagcaccaggcccggcgcaaggaggtcacggatgagatagtgaaagagttcatgactccccggaagctgtccttcgactttcagtagcactcgttttacatatgcttataaaagaagtgatgtatcagtaatgtatcaataatcccagcccagtcaaagcaccgccacctgtaggcttctgtctcatggtaattactgggcctggcctctgtaagcctgtgtatgttatcaatactgtttcttcctgtgagttccattatttctatctcttatgggcaaagcattgtgggtaattggtgctggctaacattgcatggtcggatagagaagtccagctgtgagtctctccccaaagcagccccacagtggagcctttggctggaagtccatgggccaccctgttcttgtccatggaggactccgagggttccaagtatactcttaagacccactctgtttaaaaatatatattctatgtatgcgtatatggaattgaaatgtcattattgtaacctagaaagtgctttgaaatattgatgtggggaggtttattgagcacaagatgtatttcagcccatgccccctcccaaaaagaaattgataagtaaaagcttcgttatacatttgactaagaaatcacccagctttaaagctgcttttaacaatgaagattgaacagagttcagcaattttgattaaattaagacttgggggtgaaactttccagtttactgaactccagaccatgcatgtagtccactccagaaatcatgctcgcttcccttggcacaccagtgttctcctgccaaatgaccctagaccctctgtcctgcagagtcagggtggcttttcccctgactgtgtccgatgccaaggagtcctggcctccgcagatgcttcattttgacccttggctgcagtggaagtcagcacagagcagtgccctggctgtgtccctggacgggtggacttagctagggagaaagtcgaggcagcagccctcgaggccctcacagatgtctaggcaggcctcatttcatcacgcagcatgtgcaggcctggaagagcaaagccaaatctcagggaagtccttggttgatgtatctgggtctcctctggagcactctgccctcctgtcacccagtagagtaaataaacttccttggctcctg

SEQ ID NO: 1273 - DNA, 2703 bp, Homo sapiens
cggacgcccaggagacagccggttgctgagccgggagcgctgactggcccggctgggcaggggcactctcagcagctcaactgcccagcgtgaccagtggccacctctgcagtgtcttccacaacctggtcttgactcgtctgctgaacaaatcctctgacctcaggccggctgtgaacgtagttcctgagagatagcaaacatgcccaacagtgagcccgcatctctgctggagctgttcaacagcatcgccacacaaggggagctcgtaaggtccctcaaagcgggaaatgcgtcaaaggatgaaattgattctgcagtaaagatgttggtgtcattaaaaatgagctacaaagctgccgcgggggaggattacaaggctgactgtcctccagggaacccagcacctaccagtaatcatggcccagatgccacagaagctgaagaggattttgtggacccatggacagtacagacaagcagtgcaaaaggcatagactacgataagctcattgttcggtttggaagtagtaaaattgacaaagagctaataaaccgaatagagagagccaccggccaaagaccacaccacttcctgcgcagaggcatcttcttctcacacagagatatgaatcaggttcttgatgcctatgaaaataagaagccattttatctgtacacgggccggggcccctcttctgaagcaatgcatgtaggtcacctcattccatttattttcacaaagtggctccaggatgtatttaacgtgcccttggtcatccagatgacggatgacgagaagtatctgtggaaggacctgaccctggaccaggcctatagctatgctgtggagaatgccaaggacatcatcgcctgtggctttgacatcaacaagactttcatattctctgacctggactacatggggatgagctcaggtttctacaaaaatgtggtgaagattcaaaagcatgttaccttcaaccaagtgaaaggcattttcggcttcactgacagcgactgcattgggaagatcagttttcctgccatccaggctgctccctccttcagcaactcattcccacagatcttccgagacaggacggatatccagtgccttatcccatgtgccattgaccaggatccttactttagaatgacaagggacgtcgcccccaggatcggctatcctaaaccagccctgctgcactccaccttcttcccagccctgcagggcgcccagaccaaaatgagtgccagcgaccccaactcctccatcttcctcaccgacacggccaagcagatcaaaaccaaggtcaataagcatgcgttttctggagggagagacaccatcgaggagcacaggcagtttgggggcaactgtgatgtggacgtgtctttcatgtacctgaccttcttcctcgaggacgacgacaagctcgagcagatcaggaaggattacaccagcggagccatgctcaccggtgagctcaagaaggcactcatagaggttctgcagcccttgatcgcagagcaccaggcccggcgcaaggaggtcacggatgagatagtgaaagagttcatgactccccggaagctgtccttcgactttcagtagcactcgttttacatatgcttataaaagaagtgatgtatcagtaatgtatcaataatcccagcccagtcaaagcaccgccacctgtaggcttctgtctcatggtaattactgggcctggcctctgtaagcctgtgtatgttatcaatactgtttcttcctgtgagttccattatttctatctcttatgggcaaagcattgtgggtaattggtgctggctaacattgcatggtcggatagagaagtccagctgtgagtctctccccaaagcagccccacagtggagcctttggctggaagtccatgggccaccctgttcttgtccatggaggactccgagggttccaagtatactcttaagacccactctgtttaaaaatatatattctatgtatgcgtatatggaattgaaatgtcattattgtaacctagaaagtgctttgaaatattgatgtggggaggtttattgagcacaagatgtatttcagcccatgccccctcccaaaaagaaattgataagtaaaagcttcgttatacatttgactaagaaatcacccagctttaaagctgcttttaacaatgaagattgaacagagttcagcaattttgattaaattaagacttgggggtgaaactttccagtttactgaactccagaccatgcatgtagtccactccagaaatcatgctcgcttcccttggcacaccagtgttctcctgccaaatgaccctagaccctctgtcctgcagagtcagggtggcttttcccctgactgtgtccgatgccaaggagtcctggcctccgcagatgcttcattttgacccttggctgcagtggaagtcagcacagagcagtgccctggctgtgtccctggacgggtggacttagctagggagaaagtcgaggcagcagccctcgaggccctcacagatgtctaggcaggcctcatttcatcacgcagcatgtgcaggcctggaagagcaaagccaaatctcagggaagtccttggttgatgtatctgggtctcctctggagcactctgccctcctgtcacccagtagagtaaataaacttccttggctcctg

SEQ ID NO: 1274 - DNA, 1855 bp, Homo sapiens
cctcaggccggctgtgaacgtagttcctgagagatagcaaacatgcccaacagtgagcccgcatctctgctggagctgttcaacagcatcgccacacaaggggagctcgtaaggtccctcaaagcgggaaatgcgtcaaaggatgaaattgattctgcagtaaagatgttggtgtcattaaaaatgagctacaaagctgccgcgggggaggattacaaggctgactgtcctccagggaacccagcacctaccagtaatcatggcccagatgccacagaagctgaagaggattttgtggacccatggacagtacagacaagcagtgcaaaaggcatagactacgataagctcattgttcggtttggaagtagtaaaattgacaaagagctaataaaccgaatagagagagccaccggccaaagaccacaccacttcctgcgcagaggcatcttcttctcacacagagatatgaatcaggttcttgatgcctatgaaaataagaagccattttatctgtacacgggccggggcccctcttctgaagcaatgcatgtaggtcacctcattccatttattttcacaaagtggctccaggatgtatttaacgtgcccttggtgatccagatgacggatgacgagaagtatctgtggaaggacctgaccctggaccaggcctatagctatgctgtggagaatgccaaggacatcatcgcctgtggctttgacatcaacaagactttcatattctctgacctggactacatggggatgagctcaggtttctacaaaaatgtggtgaagattcaaaagcatgttaccttcaaccaagtgaaaggcattttcggcttcactgacagcgactgcattgggaagatcagttttcctgccatccaggctgctccctccttcagcaactcattcccacagatcttccgagacaggacggatatccagtgccttatcccatgtgccattgaccaggatccttactttagaatgacaagggacgtcgcccccaggatcggctatcctaaaccagccctgttgcactccaccttcttcccagccctgcagggcgcccagaccaaaatgagtgccagcgaccccaactcctccatcttcctcaccgacacggccaagcagatcaaaaccaaggtcaataagcatgcgttttctggagggagagacaccatcgaggagcacaggcagtttgggggcaactgtgatgtggacgtgtctttcatgtacctgaccttcttcctcgaggacgacgacaagctcgagcagatcaggaaggattacaccagcggagccatgctcaccggtgagctcaagaaggcactcatagaggttctgcagcccttgatcgcagagcaccaggcccggcgcaaggaggtcacggatgagatagtgaaagagttcatgactccccggaagctgtccttcgactttcagtagcactcgttttacatatgcttataaaagaagtgatgtatcagtaatgtatcaataatcccagcccagtcaaagcaccgccacctgtaggcttctgtctcatggtaattactgggcctggcctctgtaagcctgtgtatgttatcaatactgtttcttcctgtgagttccattatttctatctcttatgggcaaagcattgtgggtaattggtgctggctaacattgcatggtcggatagagaagtccagctgtgagtctctccccaaagcagccccacagtggagcctttggctggaagtccatgggccaccctgttcttgtccatggaggactccgagggttccaagtatactcttaagacccactctgtttaaaaatatatattctatgtatgcgt

SEQ ID NO: 1275 - DNA, 2902 bp, Homo sapiens
tgcaatgaccagctaatggctcgattctcaagagggtttcattggtctcaacctggccccccaggcaacccacccctgattggacagtctcatcaagaaggttggtcaagagctcaagtgtttctgagaatctgggtgatttataagaaacccttagctgaatgcagggtggggagaacgaaagacaaaagcatcttttttcagaagggaaactgaaagaaagaggggaagagtattaaagaccatttctggctgggcagggcactctcagcagctcaactgcccagcgtgaccagtggccacctctgcagtgtcttccacaacctggtcttgactcgtctgctgaacaaatcctctgacctcaggccggctgtgaacgtagttcctgagagatagcaaacatgcccaacagtgagcccgcatctctgctggagctgttcaacagcatcgccacacaaggggagctcgtaaggtccctcaaagcgggaaatgcgtcaaaggatgaaattgattctgcagtaaagatgttggtgtcattaaaaatgagctacaaagctgccgcgggggaggattacaaggctgactgtcctccagggaacccagcacctaccagtaatcatggcccagatgccacagaagctgaagaggattttgtggacccatggacagtacagacaagcagtgcaaaaggcatagactacgataagctcattgttcggtttggaagtagtaaaattgacaaagagctaataaaccgaatagagagagccaccggccaaagaccacaccacttcctgcgcagaggcatcttcttctcacacagagatatgaatcaggttcttgatgcctatgaaaataagaagccattttatctgtacacgggccggggcccctcttctgaagcaatgcatgtaggtcacctcattccatttattttcacaaagtggctccaggatgtatttaacgtgcccttggtcatccagatgacggatgacgagaagtatctgtggaaggacctgaccctggaccaggcctatagctatgctgtggagaatgccaaggacatcatcgcctgtggctttgacatcaacaagactttcatattctctgacctggactacatggggatgagctcaggtttctacaaaaatgtggtgaagattcaaaagcatgttaccttcaaccaagtgaaaggcattttcggcttcactgacagcgactgcattgggaagatcagttttcctgccatccaggctgctccctccttcagcaactcattcccacagatcttccgagacaggacggatatccagtgccttatcccatgtgccattgaccaggatccttactttagaatgacaagggacgtcgcccccaggatcggctatcctaaaccagccctgctgcactccaccttcttcccagccctgcagggcgcccagaccaaaatgagtgccagcgaccccaactcctccatcttcctcaccgacacggccaagcagatcaaaaccaaggtcaataagcatgcgttttctggagggagagacaccatcgaggagcacaggcagtttgggggcaactgtgatgtggacgtgtctttcatgtacctgaccttcttcctcgaggacgacgacaagctcgagcagatcaggaaggattacaccagcggagccatgctcaccggtgagctcaagaaggcactcatagaggttctgcagcccttgatcgcagagcaccaggcccggcgcaaggaggtcacggatgagatagtgaaagagttcatgactccccggaagctgtccttcgactttcagtagcactcgttttacatatgcttataaaagaagtgatgtatcagtaatgtatcaataatcccagcccagtcaaagcaccgccacctgtaggcttctgtctcatggtaattactgggcctggcctctgtaagcctgtgtatgttatcaatactgtttcttcctgtgagttccattatttctatctcttatgggcaaagcattgtgggtaattggtgctggctaacattgcatggtcggatagagaagtccagctgtgagtctctccccaaagcagccccacagtggagcctttggctggaagtccatgggccaccctgttcttgtccatggaggactccgagggttccaagtatactcttaagacccactctgtttaaaaatatatattctatgtatgcgtatatggaattgaaatgtcattattgtaacctagaaagtgctttgaaatattgatgtggggaggtttattgagcacaagatgtatttcagcccatgccccctcccaaaaagaaattgataagtaaaagcttcgttatacatttgactaagaaatcacccagctttaaagctgcttttaacaatgaagattgaacagagttcagcaattttgattaaattaagacttgggggtgaaactttccagtttactgaactccagaccatgcatgtagtccactccagaaatcatgctcgcttcccttggcacaccagtgttctcctgccaaatgaccctagaccctctgtcctgcagagtcagggtggcttttcccctgactgtgtccgatgccaaggagtcctggcctccgcagatgcttcattttgacccttggctgcagtggaagtcagcacagagcagtgccctggctgtgtccctggacgggtggacttagctagggagaaagtcgaggcagcagccctcgaggccctcacagatgtctaggcaggcctcatttcatcacgcagcatgtgcaggcctggaagagcaaagccaaatctcagggaagtccttggttgatgtatctgggtctcctctggagcactctgccctcctgtcacccagtagagtaaataaacttccttggctcctg

SEQ ID NO: 1276 - DNA, 2690 bp, Homo sapiens
ctgaaagaaagaggggaagagtattaaagaccatttctggctgggcagggcactctcagcagctcaactgcccagcgtgaccagtggccacctctgcagtgtcttccacaacctggtcttgactcgtctgctgaacaaatcctctgacctcaggccggctgtgaacgtagttcctgagagatagcaaacatgcccaacagtgagcccgcatctctgctggagctgttcaacagcatcgccacacaaggggagctcgtaaggtccctcaaagcgggaaatgcgtcaaaggatgaaattgattctgcagtaaagatgttggtgtcattaaaaatgagctacaaagctgccgcgggggaggattacaaggctgactgtcctccagggaacccagcacctaccagtaatcatggcccagatgccacagaagctgaagaggattttgtggacccatggacagtacagacaagcagtgcaaaaggcatagactacgataagctcattgttcggtttggaagtagtaaaattgacaaagagctaataaaccgaatagagagagccaccggccaaagaccacaccacttcctgcgcagaggcatcttcttctcacacagagatatgaatcaggttcttgatgcctatgaaaataagaagccattttatctgtacacgggccggggcccctcttctgaagcaatgcatgtaggtcacctcattccatttattttcacaaagtggctccaggatgtatttaacgtgcccttggtcatccagatgacggatgacgagaagtatctgtggaaggacctgaccctggaccaggcctatagctatgctgtggagaatgccaaggacatcatcgcctgtggctttgacatcaacaagactttcatattctctgacctggactacatggggatgagctcaggtttctacaaaaatgtggtgaagattcaaaagcatgttaccttcaaccaagtgaaaggcattttcggcttcactgacagcgactgcattgggaagatcagttttcctgccatccaggctgctccctccttcagcaactcattcccacagatcttccgagacaggacggatatccagtgccttatcccatgtgccattgaccaggatccttactttagaatgacaagggacgtcgcccccaggatcggctatcctaaaccagccctgctgcactccaccttcttcccagccctgcagggcgcccagaccaaaatgagtgccagcgaccccaactcctccatcttcctcaccgacacggccaagcagatcaaaaccaaggtcaataagcatgcgttttctggagggagagacaccatcgaggagcacaggcagtttgggggcaactgtgatgtggacgtgtctttcatgtacctgaccttcttcctcgaggacgacgacaagctcgagcagatcaggaaggattacaccagcggagccatgctcaccggtgagctcaagaaggcactcatagaggttctgcagcccttgatcgcagagcaccaggcccggcgcaaggaggtcacggatgagatagtgaaagagttcatgactccccggaagctgtccttcgactttcagtagcactcgttttacatatgcttataaaagaagtgatgtatcagtaatgtatcaataatcccagcccagtcaaagcaccgccacctgtaggcttctgtctcatggtaattactgggcctggcctctgtaagcctgtgtatgttatcaatactgtttcttcctgtgagttccattatttctatctcttatgggcaaagcattgtgggtaattggtgctggctaacattgcatggtcggatagagaagtccagctgtgagtctctccccaaagcagccccacagtggagcctttggctggaagtccatgggccaccctgttcttgtccatggaggactccgagggttccaagtatactcttaagacccactctgtttaaaaatatatattctatgtatgcgtatatggaattgaaatgtcattattgtaacctagaaagtgctttgaaatattgatgtggggaggtttattgagcacaagatgtatttcagcccatgccccctcccaaaaagaaattgataagtaaaagcttcgttatacatttgactaagaaatcacccagctttaaagctgcttttaacaatgaagattgaacagagttcagcaattttgattaaattaagacttgggggtgaaactttccagtttactgaactccagaccatgcatgtagtccactccagaaatcatgctcgcttcccttggcacaccagtgttctcctgccaaatgaccctagaccctctgtcctgcagagtcagggtggcttttcccctgactgtgtccgatgccaaggagtcctggcctccgcagatgcttcattttgacccttggctgcagtggaagtcagcacagagcagtgccctggctgtgtccctggacgggtggacttagctagggagaaagtcgaggcagcagccctcgaggccctcacagatgtctaggcaggcctcatttcatcacgcagcatgtgcaggcctggaagagcaaagccaaatctcagggaagtccttggttgatgtatctgggtctcctctggagcactctgccctcctgtcacccagtagagtaaataaacttccttggctcctg

SEQ ID NO: 1277 - DNA, 2758 bp, Homo sapiens
gtttccacggacgcccaggagacagccggttgctgagccgggagcgctgactggcccggctgggcaggctgaaagaaagaggggaagagtattaaagaccatttctggctgggcagggcactctcagcagctcaactgcccagcgtgaccagtggccacctctgcagtgtcttccacaacctggtcttgactcgtctgctgaacaaatcctctgacctcaggccggctgtgaacgtagttcctgagagatagcaaacatgcccaacagtgagcccgcatctctgctggagctgttcaacagcatcgccacacaaggggagctcgtaaggtccctcaaagcgggaaatgcgtcaaaggatgaaattgattctgcagtaaagatgttggtgtcattaaaaatgagctacaaagctgccgcgggggaggattacaaggctgactgtcctccagggaacccagcacctaccagtaatcatggcccagatgccacagaagctgaagaggattttgtggacccatggacagtacagacaagcagtgcaaaaggcatagactacgataagctcattgttcggtttggaagtagtaaaattgacaaagagctaataaaccgaatagagagagccaccggccaaagaccacaccacttcctgcgcagaggcatcttcttctcacacagagatatgaatcaggttcttgatgcctatgaaaataagaagccattttatctgtacacgggccggggcccctcttctgaagcaatgcatgtaggtcacctcattccatttattttcacaaagtggctccaggatgtatttaacgtgcccttggtcatccagatgacggatgacgagaagtatctgtggaaggacctgaccctggaccaggcctatagctatgctgtggagaatgccaaggacatcatcgcctgtggctttgacatcaacaagactttcatattctctgacctggactacatggggatgagctcaggtttctacaaaaatgtggtgaagattcaaaagcatgttaccttcaaccaagtgaaaggcattttcggcttcactgacagcgactgcattgggaagatcagttttcctgccatccaggctgctccctccttcagcaactcattcccacagatcttccgagacaggacggatatccagtgccttatcccatgtgccattgaccaggatccttactttagaatgacaagggacgtcgcccccaggatcggctatcctaaaccagccctgctgcactccaccttcttcccagccctgcagggcgcccagaccaaaatgagtgccagcgaccccaactcctccatcttcctcaccgacacggccaagcagatcaaaaccaaggtcaataagcatgcgttttctggagggagagacaccatcgaggagcacaggcagtttgggggcaactgtgatgtggacgtgtctttcatgtacctgaccttcttcctcgaggacgacgacaagctcgagcagatcaggaaggattacaccagcggagccatgctcaccggtgagctcaagaaggcactcatagaggttctgcagcccttgatcgcagagcaccaggcccggcgcaaggaggtcacggatgagatagtgaaagagttcatgactccccggaagctgtccttcgactttcagtagcactcgttttacatatgcttataaaagaagtgatgtatcagtaatgtatcaataatcccagcccagtcaaagcaccgccacctgtaggcttctgtctcatggtaattactgggcctggcctctgtaagcctgtgtatgttatcaatactgtttcttcctgtgagttccattatttctatctcttatgggcaaagcattgtgggtaattggtgctggctaacattgcatggtcggatagagaagtccagctgtgagtctctccccaaagcagccccacagtggagcctttggctggaagtccatgggccaccctgttcttgtccatggaggactccgagggttccaagtatactcttaagacccactctgtttaaaaatatatattctatgtatgcgtatatggaattgaaatgtcattattgtaacctagaaagtgctttgaaatattgatgtggggaggtttattgagcacaagatgtatttcagcccatgccccctcccaaaaagaaattgataagtaaaagcttcgttatacatttgactaagaaatcacccagctttaaagctgcttttaacaatgaagattgaacagagttcagcaattttgattaaattaagacttgggggtgaaactttccagtttactgaactccagaccatgcatgtagtccactccagaaatcatgctcgcttcccttggcacaccagtgttctcctgccaaatgaccctagaccctctgtcctgcagagtcagggtggcttttcccctgactgtgtccgatgccaaggagtcctggcctccgcagatgcttcattttgacccttggctgcagtggaagtcagcacagagcagtgccctggctgtgtccctggacgggtggacttagctagggagaaagtcgaggcagcagccctcgaggccctcacagatgtctaggcaggcctcatttcatcacgcagcatgtgcaggcctggaagagcaaagccaaatctcagggaagtccttggttgatgtatctgggtctcctctggagcactctgccctcctgtcacccagtagagtaaataaacttccttggctcctg

SEQ ID NO: 1278 - DNA, 1961 bp, Homo sapiens
acagccggttgctgagccgggagcgctgactggcccggctgggcagggtgaatctacttctcttaacaaagtctcaatgtcctatttgcaatttatgtggtaaacactgaagacaatggtccttaaccttttggcatctcagcctcctttcgaaagtcttgactcgtctgctgaacaaatcctctgacctcaggccggctgtgaacgtagttcctgagagatagcaaacatgcccaacagtgagcccgcatctctgctggagctgttcaacagcatcgccacacaaggggagctcgtaaggtccctcaaagcgggaaatgcgtcaaaggatgaaattgattctgcagtaaagatgttggtgtcattaaaaatgagctacaaagctgccgcgggggaggattacaaggctgactgtcctccagggaacccagcacctaccagtaatcatggcccagatgccacagaagctgaagaggattttgtggacccatggacagtacagacaagcagtgcaaaaggcatagactacgataagctcattgttcggtttggaagtagtaaaattgacaaagagctaataaaccgaatagagagagccaccggccaaagaccacaccacttcctgcgcagaggcatcttcttctcacacagagatatgaatcaggttcttgatgcctatgaaaataagaagccattttatctgtacacgggccggggcccctcttctgaagcaatgcatgtaggtcacctcattccatttattttcacaaagtggctccaggatgtatttaacgtgcccttggtcatccagatgacggatgacgagaagtatctgtggaaggacctgaccctggaccaggcctatagctatgctgtggagaatgccaaggacatcatcgcctgtggctttgacatcaacaagactttcatattctctgacctggactacatggggatgagctcaggtttctacaaaaatgtggtgaagattcaaaagcatgttaccttcaaccaagtgaaaggcattttcggcttcactgacagcgactgcattgggaagatcagttttcctgccatccaggctgctccctccttcagcaactcattcccacagatcttccgagacaggacggatatccagtgccttatcccatgtgccattgaccaggatccttactttagaatgacaagggacgtcgcccccaggatcggctatcctaaaccagccctgctgcactccaccttcttcccagccctgcagggcgcccagaccaaaatgagtgccagcgaccccaactcctccatcttcctcaccgacacggccaagcagatcaaaaccaaggtcaataagcatgcgttttctggagggagagacaccatcgaggagcacaggcagtttgggggcaactgtgatgtggacgtgtctttcatgtacctgaccttcttcctcgaggacgacgacaagctcgagcagatcaggaaggattacaccagcggagccatgctcaccggtgagctcaagaaggcactcatagaggttctgcagcccttgatcgcagagcaccaggcccggcgcaaggaggtcacggatgagatagtgaaagagttcatgactccccggaagctgtccttcgactttcagtagcactcgttttacatatgcttataaaagaagtgatgtatcagtaatgtatcaataatcccagcccagtcaaagcaccgccacctgtaggcttctgtctcatggtaattactgggcctggcctctgtaagcctgtgtatgttatcaatactgtttcttcctgtgagttccattatttctatctcttatgggcaaagcattgtgggtaattggtgctggctaacattgccaccctgttcttgtccatggaggactccgagggttccaagtatactcttaagacccactctgtttaaaaatatatattctatgtatgcgt

SEQ ID NO: 1279 - DNA, 2932 bp, Homo sapiens
cacagcaagaactgaaacgaatggggattgaactgctttgcctgttctttctatttctaggaaggaatgatcacgtacaaggtggctgtgccctgggaggtgcagaaacctgtgaagactgcctgcttattggacctcagtgtgcctggtgtgctcaggagaattttactcatccatctggagttggcgaaaggtgtgataccccagcaaaccttttagctaaaggatgtcaattaaacttcatcgaaaaccctgtctcccaagtagaaatacttaaaaataagcctctcagtgtaggcagacagaaaaatagttctgacattgttcagattgcgcctcaaagcttgatccttaagttgagaccaggtggtgcgcagactctgcaggtgcatgtccgccagactgaggactacccggtggatttgtattacctcatggacctctccgcctccatggatgacgacctcaacacaataaaggagctgggctcccggctttccaaagagatgtctaaattaaccagcaactttagactgggcttcggatcttttgtggaaaaacctgtatccccttttgtgaaaacaacaccagaagaaattgccaacccttgcagtagtattccatacttctgtttacctacatttggattcaagcacattttgccattgacaaatgatgctgaaagattcaatgaaattgtgaagaatcagaaaatttctgctaatattgacacacccgaaggtggatttgatgcaattatgcaagctgctgtgtgtaaggaaaaaattggctggcggaatgactccctccacctcctggtctttgtgagtgatgctgattctcattttggaatggacagcaaactagcaggcatcgtcattcctaatgacgggctctgtcacttggacagcaagaatgaatactccatgtcaactgtcttggaatatccaacaattggacaactcattgataaactggtacaaaacaacgtgttattgatcttcgctgtaacccaagaacaagttcatttatatgagaattacgcaaaacttattcctggagctacagtaggtctacttcagaaggactccggaaacattctccagctgatcatctcagcttatgaagaactgcggtctgaggtggaactggaagtattaggagacactgaaggactcaacttgtcatttacagccatctgtaacaacggtaccctcttccaacaccaaaagaaatgctctcacatgaaagtgggagacacagcttccttcagcgtgactgtgaatatcccacactgcgagagaagaagcaggcacattatcataaagcctgtggggctgggggatgccctggaattacttgtcagcccagaatgcaactgcgactgtcagaaagaagtggaagtgaacagctccaaatgtcaccacgggaacggctctttccagtgtggggtgtgtgcctgccaccctggccacatggggcctcgctgtgagtgtggcgaggacatgctgagcacagattcctgcaaggaggccccagatcatccctcctgcagcggaaggggtgactgctactgtgggcagtgtatctgccacttgtctccctatggaaacatttatgggccttattgccagtgtgacaatttctcctgcgtgagacacaaagggctgctctgcggaggtaacggcgactgtgactgtggtgaatgtgtgtgcaggagcggctggactggcgagtactgcaactgcaccaccagcacggactcctgcgtctctgaagatggagtgctctgcagcgggcgcggggactgtgtttgtggcaagtgtgtttgcacaaaccctggagcctcaggaccaacctgtgaacgatgtcctacctgtggtgacccctgtaactctaaacggagctgcattgagtgccacctgtcagcagctggccaagcccgagaagaatgtgtggacaagtgcaaactagctggtgcgaccatcagtgaagaagaagatttctcaaaggatggttctgtttcctgctctctgcaaggagaaaatgaatgtcttattacattcctaataactacagataatgaggggaaaaccatcattcacagcatcaatgaaaaagattgtccgaagcctccaaacattcccatgatcatgttaggggtttccctggctattcttctcatcggggttgtcctactgtgcatctggaagctactggtgtcatttcatgatcgtaaagaagttgccaaatttgaagcagaacgatcaaaagccaagtggcaaacgggaaccaatccactctacagaggatccacaagtacttttaaaaatgtaacttataaacacagggaaaaacaaaaggtagacctttccacagattgctagaactactttatgcatgaaaaaagtctgtttcactgatatgaaatgttaatgcactatttaatttttttctctttgttgcttcaaaatgaggttggtttaagataataataggacatctgcagataagtcatcctctacatgaaggtgacagactgttggcagtttcaaaataatcaagaagagaaatatccttagcaaagagatgactttggggatcatttgaggaatactaactctgttgcattaatgcttcaaaaaatcatcaaatgattcatgggggcctgatttgcatttgaaaaatgtttgaaattagagtctcatttgtttcaggaatgcagctacctgagttttttgtctcggcaaagtcacaaagcccatatactcacattgtgtgtctatacttgccaattaattctaaacttgtaggaaatatgccctctcttaaaggagaattttttttaaatctctgagaaatgagattctgagtttatttcagctaaaaggttgcaattcttctgaagatatctcaaatataaggttgaaag

SEQ ID NO: 1280 - DNA, 4408 bp, Homo sapiens
cctggcctcgcgggccgtgtctccggcatcatgtgtggtatatttgcttacttaaactaccatgttcctcgaacgagacgagaaattcctggagaccctaatcaaaggcctcagagactggagtacagagctcatgatggtttaggtgtgggatttgatggaggcaatgataaagattgggaagccaatgcctgcaaaatccagcttattaagaagaaaggaaaagttaaggcactggatgaagaagttcacaagcaacaagatatggatttggatatagaatttgatgtacaccttggaatagctcatacccgttgggcaacacatggagaacccagtcctgtcaatagccacccccagcgctctgataaaaataatgaatttatcgttattcacaatggaatcatcaccaactacaaagacttgaaaaagtttttggaaagcaaaggctatgacttcgaatctgaaacagacacagagacaattgccaagctcgttaagtatatgtatgacaatcgggaaagtcaagataccagctttactaccttggtggagagagttatccaacaattggaaggtgcttttgcacttgtgtttaaaagtgttcattttcccgggcaagcagttggcacaaggcgaggtagccctctgttgattggtgtacggagtgaacataaactttctactgatcacattcctatactctacagaacaggcaaagacaagaaaggaagctgcaatctctctcgtgtggacagcacaacctgccttttcccggtggaagaaaaagcagtggagtattactttgcttctgatgcaagtgctgtcatagaacacaccaatcgcgtcatctttctggaagatgatgatgttgcagcagtagtggatggacgtctttctatccatcgaattaaacgaactgcaggagatcaccccggacgagctgtgcaaacactccagatggaactccagcagatcatgaagggcaacttcagttcatttatgcagaaggaaatatttgagcagccagagtctgtcgtgaacacaatgagaggaagagtcaactttgatgactatactgtgaatttgggtggtttgaaggatcacataaaggagatccagagatgccggcgtttgattcttattgcttgtggaacaagttaccatgctggtgtagcaacacgtcaagttcttgaggagctgactgagttgcctgtgatggtggaactagcaagtgacttcctggacagaaacacaccagtctttcgagatgatgtttgctttttccttagtcaatcaggtgagacagcagatactttgatgggtcttcgttactgtaaggagagaggagctttaactgtggggatcacaaacacagttggcagttccatatcacgggagacagattgtggagttcatattaatgctggtcctgagattggtgtggccagtacaaaggcttataccagccagtttgtatcccttgtgatgtttgcccttatgatgtgtgatgatcggatctccatgcaagaaagacgcaaagagatcatgcttggattgaaacggctgcctgatttgattaaggaagtactgagcatggatgacgaaattcagaaactagcaacagaactttatcatcagaagtcagttctgataatgggacgaggctatcattatgctacttgtcttgaaggggcactgaaaatcaaagaaattacttatatgcactctgaaggcatccttgctggtgaattgaaacatggccctctggctttggtggataaattgatgcctgtgatcatgatcatcatgagagatcacacttatgccaagtgtcagaatgctcttcagcaagtggttgctcggcaggggcggcctgtggtaatttgtgataaggaggatactgagaccattaagaacacaaaaagaacgatcaaggtgccccactcagtggactgcttgcagggcattctcagcgtgatccctttacagttgctggctttccaccttgctgtgctgagaggctatgatgttgatttcccacggaatcttgccaaatctgtgactgtagagtgaggaatatctatacaaaatgtacgaaactgtatgattaagcaacacaagacaccttttgtatttaaaaccttgatttaaaatatcaccccttgaagcctttttttagtaaatccttatttatatatcagttataattattccactcaatatgtgatttttgtgaagttacctcttacattttcccagtaatttgtggaggactttgaataatggaatctatattggaatctgtatcagaaagattctagctattattttctttaaagaatgctgggtgttgcatttctggaccctccacttcaatctgagaagacaatatgtttctaaaaattggtacttgtttcaccatacttcattcagaccagtgaaagagtagtgcatttaattggagtatctaaagccagtggcagtgtatgctcatacttggacagttagggaagggtttgccaagttttaagagaagatgtgatttattttgaaatttgtttctgttttgtttttaaatcaaactgtaaaacttaaaactgaaaaattttattggtaggatttatatctaagtttggttagccttagtttctcagacttgttgtctattatctgtaggtggaagaaatttaggaagcgaaatattacagtagtgcattggtgggtctcaatccttaacatatttgcacaattttatagcacaaactttaaattcaagctgctttggacaactgacaatatgattttaaatttgaagatgggatgtgtacatgttgggtatcctactactttgtgttttcatctcctaaaagtggtttttatttccttgtatctgtagtcttttattttttaaatgactgctgaatgacatattttatcttgttctttaaaatcacaacacagagctgctattaaattaatattgatatattcagtattctcttcaactttgtcacgaggaagaatttcctgtagttaattttaactttccttcattacattgttgcataaaactagtcccttagtgccagtttggaagttacttgcaattgtttggaagatttgcaggtcgctgacctcatcatttcactctaagtatatgtggtaggctaagctcagaaaaaggtatgtatgctttacactgataggcaccaaatttagtattgtatcctaagtatttttcctcttctgtattttctgtgctctacccctgaaatatatttaggaataaagaagatataaataaagtgatattggggtatgttcagcttgtaagtgtcagaaatggaagttgacaatttggattaaaatatttaaagtagaatgttattatttgatacccccaaaattgtgagtaataatttcttaatggagcttttctggccagatcttcagggctataggagagtgtgtttgtttttggtgaagtccttctttttcaaaggtttttacttttaaattgtgaagataagctatttagcacaattatttaagtaagctgttttttcctttcttttctttcttttcttgttttaacttctgggtgaggttaagattttctaatagttattgttgttgccagagaagcatagaattctgcttgtgtcttagggttagagaaagatttgttatattttgaggtaatttggaaggactttcatacatggtgactagaaacctgatctttttaagaataaaatagggtcactatttacattatatataatatatggctattatagctatattaatctactttaattgtttctaagattattttgtgtaagtcagctagcgtgtgtatagtgtcatttcttatgttttgtatattaacgttttacaaacacaatttgtgtgggtttgtagcatttcttatagtttaaagtatgattcagcattctaagttaaaactaatatgtgaagtcagtcattagtctgcataatctctgtctccctctgtgtgtgtctttctataaagcacatgtgtacacacacacacacaaatatactgaaagctagggtaagttctaaactgaatatcaaaaaccaaaatcaagaacaaagaagtgatattttccaaacaaacatggattctctgccgggtgcagtggctcagcctgtaataccagcctccactttgggagtctgaggtgggagtattgcttgagctcaagagttggagaacagcctgggcaacatggtgagacctggtctttacaaaaatttttttggccggacgcagtggctcacacctgtaatcccagcactttgggaggccgaggcaggttgatcatgaggtcaagagatcgagaccatcctggccaacatggtgaaaccccgtctttac

SEQ ID NO: 1281 - DNA, 1260 bp, Homo sapiens
tctatgagaggccatacacggtggacctgactagggtgtggcttccctgaggagctgaagttgcccagaggcccagagaaggggagctgagcacgtttgaaccactgaacctgctctggacctcgcctccttcccttcggtgcctcccagcatcctatcctctttaaagagcaggggttcagggaagttccctggatggtgattcgcaggggcagctcccctctcacctgccgcgatgactaccccgccccatctcaaacacacaagctcacgcatgcgggactggagcccttgaggacatgtggcccaaagacaggaggtacaggggctcagtgcgtgcagtggaatgaactgggcttcatctctggaagggtaaggggccatcttccgggttcaccgccgcatccccacccccggcacagcgcctcctggcgactaacatcggtgacttagtgaaaggactaagaaagacccgaggcgaggccggaacaggccgatttctagccgccaagtggagaacaggttggagcggtgcgccgggcttagcggcggttgctggaggaacgggcggagtcgcccagggtcctgccctgcgggggtcgagccgaggcaggcggtgacttccccactcggggcggagccgcagcctcgcgggggcggggcctggcgccggcggtggcgtcacaaaaggcgggaccacagtggtgtccgagaagtcaggcacgtagctcagcggcggccgcggcgcgtgcgtctgtgcctctgcgcgggtctcctggtccttctgccatcatgccgatgttcatcgtaaacaccaacgtgccccgcgcctccgtgccggacgggttcctctccgagctcacccagcagctggcgcaggccaccggcaagcccccccagtacatcgcggtgcacgtggtcccggaccagctcatggccttcggcggctccagcgagccgtgcgcgctctgcagcctgcacagcatcggcaagatcggcggcgcgcagaaccgctcctacagcaagctgctgtgcggcctgctggccgagcgcctgcgcatcagcccggacagggtctacatcaactattacgacatgaacgcggccaatgtgggctggaacaactccaccttcgcctaagagccgcagggacccacgctgtctgcgctggctccacccgggaacccgccgcacgctgtgttctaggcccgcccaccccaaccttctggtggggagaaataaacggtttagagactagga

SEQ ID NO: 1282 - DNA, 348 bp, Homo sapiens
atgccgatgttcatcgtaaacaccaacgtgccccgcgcctccgtgccggacgggttcctctccgagctcacccagcagctggcgcaggccaccggcaagcccccccagtacatcgcggtgcacgtggtcccggaccagctcatggccttcggcggctccagcgagccgtgcgcgctctgcagcctgcacagcatcggcaagatcggcggcgcgcagaaccgctcctacagcaagctgctgtgcggcctgctggccgagcgcctgcgcatcagcccggacagggtctacatcaactattacgacatgaacgcggccaatgtgggctggaacaactccaccttcgcctaa

SEQ ID NO: 1283 - DNA, 561 bp, Homo sapiens
accacagtggtgtccgagaagtcaggcacgtagctcagcggcggccgcggcgcgtgcgtctgtgcctctgcgcgggtctcctggtccttctgccatcatgccgatgttcatcgtaaacaccaacgtgccccgcgcctccgtgccggacgggttcctctccgagctcacccagcagctggcgcaggccaccggcaagcccccccagtacatcgcggtgcacgtggtcccggaccagctcatggccttcggcggctccagcgagccgtgcgcgctctgcagcctgcacagcatcggcaagatcggcggcgcgcagaaccgctcctacagcaagctgctgtgcggcctgctggccgagcgcctgcgcatcagcccggacagggtctacatcaactattacgacatgaacgcggccaatgtgggctggaacaactccaccttcgcctaagagccgcagggacccacgctgtctgcgctggctccacccgggaacccgccgcacgctgtgttctaggcccgcccaccccaaccttctggtggggagaaataaacggtttagagact

SEQ ID NO: 1284 - DNA, 8971 bp, Homo sapiens
agcccaaaccgcggccctagccccggccgcacccccagcccgcgccagcatgatgaacaacagcggctactcagacgccggcctcggcctgggcgatgagacagacgagatgccgtccacggagaaggacctggcggaggacgcgccgtggaagaagatccagcagaacacattcacgcgctggtgcaatgagcacctcaagtgcgtgggcaagcgcctgaccgacctgcagcgcgacctcagcgacgggctccggctcatcgcgctgctcgaggtgctcagccagaagcgcatgtaccgcaagttccatccgcgccccaacttccgccaaatgaagctggagaacgtgtccgtggccctcgagttcctcgagcgcgagcacatcaagctcgtgtccatagacagcaaggccatcgtggatgggaacctgaagctgatcctgggcctgatctggacgctgatcctgcactactccatctccatgcccatgtgggaggatgaagatgatgaggatgcccgcaaacagacgcccaagcagcggctgcttggctggatccagaacaaggtgccccagctgcccatcaccaacttcaaccgtgactggcaggacggcaaagctctgggcgccctggtggacaactgcgcccccggtctctgccccgactgggaggcctgggatcccaaccagcccgtggagaactcccgggaggccatgcagcaggccgacgactggcttggggtgccccaggtcattgcccctgaggagattgtggaccccaacgtggatgagcattctgttatgacctacctgtcccagttccccaaggccaagctcaaacctggtgcccctgttcgatccaagcagctgaaccccaagaaagccatcgcctatgggcctggcatcgagccacagggcaacaccgtgctgcagcctgcccacttcaccgtgcagacggtggacgcgggcgtgggcgaggtgctggtctacatcgaggaccctgaaggccacaccgaggaggctaaggtggttcccaacaatgacaaggatcgcacctatgctgtctcctatgtgcccaaggtcgctgggttacacaaggtgaccgtgctctttgctggccagaacattgaacgcagtccctttgaggtgaacgtgggcatggccctgggagatgccaacaaggtgtcagcccgtggccctggcctggaacctgtgggcaatgtggccaacaaacccacctactttgacatctacactgcgggggccggcactggcgatgttgctgtggtgatcgtggacccacagggccggcgggacacagtggaggtggccctggaggacaagggtgacagcacgttccgctgcacatacagacctgccatggaggggccacataccgtgcatgtggcctttgcgggtgcccccatcacccgcagtcccttccctgtccatgtgtcggaagcctgtaaccccaacgcctgccgcgcctctgggcgaggcctgcagcccaagggtgttcgcgtgaaagaggtggctgacttcaaggtgtttaccaagggtgccggcagcggggagctcaaggtcacggtcaaggggccaaagggcacagaggagccagtgaaggtgcgggaggctggggatggtgtgttcgagtgcgagtactacccggtggtgcctgggaagtatgtggtgaccatcacgtggggcggctacgccatccctcgcagcccctttgaggtacaggtgagcccagaggcaggagtgcaaaaggtccgggcctggggtcctggtttggagactggccaggtgggcaagtcagccgattttgtggtggaagccattggcaccgaggtggggacactgggcttctccatcgaggggccctcacaagccaagatcgaatgtgacgataagggggatggctcctgcgatgtgcggtactggcccacggagcctggggagtacgctgtgcacgtcatctgtgacgatgaggacatccgagactcacccttcattgcccacatcctgcccgccccacctgactgcttcccagataaggtgaaggcctttgggcctggcctggagcctaccggctgcatcgtggacaagcccgctgagttcaccattgatgctcgtgcagctggcaagggagacctgaagctctatgcccaggacgccgacggctgtcccatcgacatcaaggtgatccccaacggcaacggcaccttccgctgctcctacgtgcccaccaagcccattaagcacaccatcatcatctcctggggaggcgtaaacgtgcccaagagccccttccgggtgaacgtgggcgagggcagccaccccgagcgggtaaaggtgtacggccccggagtggagaagacaggcctcaaggccaatgagcccacctacttcacggtggactgcagcgaggcggggcaaggcgacgtgagcatcggcatcaagtgcgccccaggcgtggtgggccctgcagaggctgacattgacttcgacatcatcaagaatgacaacgacaccttcaccgtcaagtacacgccaccaggggcgggccgctacaccatcatggtgctgtttgccaaccaggagatccccgccagccccttccacatcaaggtggacccatcccacgatgccagcaaagtcaaggccgagggccctgggctgaatcgcacaggtgtggaagtcgggaagcccacccacttcacggtgctgaccaagggagccggcaaggccaagctggatgtgcagtttgcagggacagccaagggcgaggttgtgcgggactttgagatcatagacaaccatgactactcctacactgtcaagtacaccgctgtccagcagggcaacatggcagtgacagtgacttatggcggggaccctgtccccaagagcccctttgtggtgaatgtggcacccccgctggacctcagcaaaatcaaagttcagggccttaatagcaaggtggctgtgggacaggaacaagcattctctgtgaacacacgaggggctggcggtcagggccaactggatgtgcggatgacttcgccctctcgccggcccatcccctgcaagctggagccaggcggtggagcggaagcccaggctgtgcgctacatgcccccggaggaggggccctacaaggtggatatcacctacgatggtcacccggtgcctggcagcccgtttgctgtggagggtgtcctgccccctgatccctccaaggtctgtgcttatggcccgggtctcaagggtggactggtaggcacccccgcgccattctccatcgacaccaagggggctggcacaggtggcctggggctgaccgtagagggcccctgcgaggccaagatcgagtgccaggacaatggtgatggctcatgtgctgtcagctacctgcccacggagcctggcgagtacaccatcaacatcctgtttgctgaggcccacatccctggctcgcccttcaaagccaccattcggcctgtgtttgacccgagcaaggtgcgggccagtggaccgggcctggagcgcggcaaggtcggtgaggcagccaccttcactgtggactgctcagaggcaggcgaggcggagctgaccattgagatcctgtcggatgccggggtcaaggccgaggtgctgatccacaacaacgcggatggcacctaccacatcacctacagccctgccttccctggcacctacaccattaccatcaagtatggcgggcatcccgtgcccaaattccccacccgtgtccatgtgcagcctgcggtcgataccagtggcgtcaaggtctcagggcctggtgttgagccacacggtgtcctgcgggaggtgaccactgagttcactgtggatgcaagatccctaacagccacaggcggcaaccacgtgacggctcgtgtgctcaacccctcgggggccaagacagacacctatgtgacagacaatggggacggcacctaccgagtgcagtacaccgcctacgaggagggcgtgcatctggtggaggtcctgtatgatgaggtcgctgtgcccaagagccccttccgagtgggcgtgaccgagggctgtgatcccacccgcgtccgagccttcgggccaggcctggagggtggcttggtcaacaaggccaaccgattcactgtggagaccaggggagcgggcaccgggggccttggcctagccatcgagggtccctcggaagccaagatgtcctgcaaggacaacaaggatggtagctgcaccgtggagtacatccccttcactcctggagactatgacgtcaacatcaccttcggggggcggcccatcccagggagcccgttccgcgtgccagtgaaggatgtggtggaccctgggaaggtgaagtgctcagggccagggctgggggctggtgtcagggcccgggttcctcagaccttcacagtggactgcagtcaagctggccgggcgcccctgcaggtggctgtgctgggccccacaggtgtggccgagcctgtggaggtgcgggacaatggagatggcacccacactgtccactacaccccagccactgacgggccctacacggtagccgtcaagtatgctgaccaggaggtgccacgcagccccttcaagatcaaggtcctcccagctcatgatgccagcaaggtgcgggccagcgggccaggcctcaacgcctctggcatccctgccagcctgcctgtggagttcaccatcgacgcacgggacgcgggcgaggggttgctcactgtccagatcttgggccccgagggtaagcccaagaaggccaacatccgggacaatggggatggcacgtacgctgtgtcctacctgccggacatgagtggccggtacaccatcaccatcaagtatggcggtgatgagatcccctactcgcccttccgcatccatgctctgcccactggggatgccagcaagtgcctcgtcacagtgtccattggaggccatggcctgggtgcctgcctgggccctcgaatccagattgggcaggagacggtgatcacggtggatgccaaggcagccggtgaggggaaggtgacatgcacggtgtccacgccggatggggcagagctcgatgtggatgtggttgagaaccatgacggtacctttgacatctactacacagcgcccgagccgggcaagtacgtcatcaccatccgcttcgggggtgagcacatccccaacagccccttccacgtgctggcgtgtgaccccctgccgcacgaggaggagccctctgaagtgccacagctgcgccagccctacgctcctccccggcccggcgcccgccccacacactgggccacagaggagccagtggtgcctgtggagccaatggagtccatgctgaggcccttcaacctggtcatccccttcgcggtgcagaaaggggagctcacaggagaggtgcggatgccctcggggaagacggcacggcccaacatcaccgacaacaaggacggcaccatcacggtgaggtatgcacccactgagaaaggcctgcaccagatggggatcaagtatgacggcaaccacatccctgggagccccttacagttctatgtggatgccatcaacagccgccatgtcagtgcctatgggccaggcctgagccatggcatggtcaacaagccagccaccttcactattgtcaccaaagatgctggagaagggggtctgtcactggccgtggagggcccatccaaggcagagatcacctgtaaggacaacaaggatggcacctgcaccgtgtcctatctgccgactgcgcctggagactacagcatcatcgtgcgcttcgatgacaagcacatcccggggagccccttcacagccaagatcacaggtgatgactccatgaggacctcacagctgaatgtgggcacctccacggacgtgtcactgaagatcaccgagagtgatctgagccagctgaccgccagcatccgtgccccctcgggcaacgaggagccctgcctgctgaagcgcctgcccaaccggcacattgggatctccttcacccccaaggaggtcggggagcacgtggtgagcgtgcgcaagagtggcaagcatgtcaccaacagccccttcaagatcctggtggggccatctgagatcggggacgccagcaaggtgcgggtctggggcaaggggctttccgagggacacacattccaggtggcagagttcatcgtggacactcgcaatgcaggttatgggggcttggggctgagtattgaaggcccaagcaaggtggacatcaactgtgaggacatggaggacgggacatgcaaagtcacctactgccccaccgagcccggcacctacatcatcaacatcaagtttgctgacaagcacgtgcctggaagccccttcactgtgaaggtgaccggcgagggccgcatgaaggagagcatcacccggcggagacaggcaccttccatcgccaccatcggcagcacctgtgacctcaacctcaagatcccaggaaactggttccagatggtgtctgcccaggagcgcctgacacgcaccttcacacgcagcagccacacctacacccgcacggagcgcacggagatcagcaagacgcggggcggggagacaaagcccgaggtgcgggtggaggagtccacccaggtcggcggggaccccttccctgctgtgtttggggacttcctgggccgggagcgcctgggatccttcggcagcatcacccggcagcaggagggtgaggccagctctcaggacatgactgcacaggtgaccagcccatcgggcaaggtggaagccgcagagatcgtcgagggcgaggacagcgcctacagcgtccgctttgtgccccaggaaatggggccccatacggtcgctgtcaagtaccgtggccagcacgtgcccggcagcccctttcagttcactgtggggccgctgggtgaaggtggtgcccacaaggtgcgggccggacgagcagggctggagcgaggtgtggccggcgtgccagccgagttcagcatctggacccgggaggctggcgctgggggcctgtccattgctgtggagggtcctagcaaagcggagattgcatttgaggatcgcaaagatggctcctgcggcgtctcctatgtcgtccaggaaccaggtgactatgaggtctccatcaagttcaatgatgagcacatcccagacagcccctttgtggtgcctgtggcctccctctcggatgacgctcgccgtctcactgtcaccagcctccaggagacggggctcaaggtgaaccagccagcgtcctttgccgtgcagctgaacggtgcccggggcgtgattgatgcccgggtgcacacaccctcgggggctgtggaggagtgctacgtctctgagctggacagtgacaagcacaccatccgcttcatcccccacgagaatggcgtccactccatcgatgtcaagttcaacggtgcccacatccctggaagtcccttcaagatccgcgttggggagcagagccaggctggggacccaggcttggtgtcagcctacggtcctgggctcgagggaggcactaccggtgtgtcatcagagttcatcgtgaacaccctgaatgccggctcgggggccttgtctgtcaccattgatggcccctccaaggtgcagctggactgtcgggagtgtcctgagggccatgtggtcacttatactcccatggcccctggcaactacctcattgccatcaagtacggtggcccccagcacatcgtgggcagccccttcaaggccaaggtcactggtccgaggctgtccggaggccacagccttcacgaaacatccacggttctggtggagactgtgaccaagtcctcctcaagccggggctccagctacagctccatccccaagttctcctcagatgccagcaaggtggtgactcggggccctgggctgtcccaggccttcgtgggccagaagaactccttcaccgtggactgcagcaaagcaggcaccaacatgatgatggtgggcgtgcacggccccaagaccccctgtgaggaggtgtacgtgaagcacatggggaaccgggtgtacaatgtcacctacactgtcaaggagaaaggggactacatcctcattgtcaagtggggtgacgaaagtgtccctggaagccccttcaaagtcaaggtcccttgaatcccaaaagtgcctccccagcctcagcccccacctccagccacacacacattacacacacacacacacacacacaaatgtgccacacccagacacgcacagaatcagacactacaaacacctgccttgggggtgaagtgaaggcccagcctccccaccccaccgcgccccaggggttggaggaccttgtctgtgtcagacagtgtccctccctggaatgtgacatgaggccgactggggccaggctcaggggcagaggctgggacacaaggggctggcgagggctgcgaggccagggaagccctgagtttctggcggggctgagcagtgggggagcattgtgttgtgggtgtctgtgtgtgaggtcaccctcaaactgcaccgccggccagataccctcctgaccccgaggacttggtctggtctctctggtggctacaaccccagagttttaaggacttggaaaggaagcacaatcagagaagaaaacagcccccaaccagcaggagcggcctggcacatggaccggcctgagcgatgtgcactccacccaagccaggctcccagggggcctgatttctctctcactgtctctttttttaaaatggttgcacggctctgccccatggggggccttttttacacactgcgaggcccagctttctaggggacttttgcacatgtcatgcagctcagctgggagctgcttaggtggaaaactccaaataaagtgcgcctgtcgcc

SEQ ID NO: 1285 - DNA, 8976 bp, Homo sapiens
agcccaaaccgcggccctagccccggccgcacccccagcccgcgccagcatgatgaacaacagcggctactcagacgccggcctcggcctgggcgatgagacagacgagatgccgtccacggagaaggacctggcggaggacgcgccgtggaagaagatccagcagaacacattcacgcgctggtgcaatgagcacctcaagtgcgtgggcaagcgcctgaccgacctgcagcgcgacctcagcgacgggctccggctcatcgcgctgctcgaggtgctcagccagaagcgcatgtaccgcaagttccatccgcgccccaacttccgccaaatgaagctggagaacgtgtccgtggccctcgagttcctcgagcgcgagcacatcaagctcgtgtccatagacagcaaggccatcgtggatgggaacctgaagctgatcctgggcctgatctggacgctgatcctgcactactccatctccatgcccatgtgggaggatgaagatgatgaggatgcccgcaaacagacgcccaagcagcggctgcttggctggatccagaacaaggtgccccagctgcccatcaccaacttcaaccgtgactggcaggacggcaaagctctgggcgccctggtggacaactgcgcccccggtctctgccccgactgggaggcctgggaccccaaccagcccgtggagaacgcccgggaggccatgcagcaggccgacgactggcttggggtgccccaggtcattgcccctgaggagattgtggaccccaacgtggatgagcattctgttatgacctacctgtcccagttccccaaggccaagctcaaacctggtgcccctgttcgatccaagcagctgaaccccaagaaagccatcgcctatgggcctggcatcgagccacagggcaacaccgtgctgcagcctgcccacttcaccgtgcagacggtggacgcgggcgtgggcgaggtgctggtctacatcgaggaccctgaaggccacaccgaggaggctaaggtggttcccaacaatgacaaggatcgcacctatgctgtctcctatgtgcccaaggtcgctgggttacacaaggtgaccgtgctctttgctggccagaacattgaacgcagtccctttgaggtgaacgtgggcatggccctgggagatgccaacaaggtgtcagcccgtggccctggcctggaacctgtgggcaatgtggccaacaaacccacctactttgacatctacactgcgggggccggcactggcgatgttgctgtggtgatcgtggacccacagggccggcgggacacagtggaggtggccctggaggacaagggtgacagcacgttccgctgcacatacagacctgccatggaggggccacataccgtgcatgtggcctttgcgggtgcccccatcacccgcagtcccttccctgtccatgtgtcggaagcctgtaaccccaacgcctgccgcgcctctgggcgaggcctgcagcccaagggtgttcgcgtgaaagaggtggctgacttcaaggtgtttaccaagggtgccggcagcggggagctcaaggtcacggtcaaggggccaaagggcacagaggagccagtgaaggtgcgggaggctggggatggtgtgttcgagtgcgagtactacccggtggtgcctgggaagtatgtggtgaccatcacgtggggcggctacgccatccctcgcagcccctttgaggtacaggtgagcccagaggcaggagtgcaaaaggtccgggcctggggtcctggtttggagactggccaggtgggcaagtcagccgattttgtggtggaagccattggcaccgaggtggggacactgggcttctccatcgaggggccctcacaagccaagatcgaatgtgacgacaagggggatggctcctgcgatgtgcggtactggcccacggagcctggggagtacgctgtgcacgtcatctgtgacgatgaggacatccgagactcacccttcattgcccacatcctgcccgccccacctgactgcttcccagataaggtgaaggcctttgggcctggcctggagcctaccggctgcatcgtggacaagcccgctgagttcaccattgatgctcgtgcagctggcaagggagacctgaagctctatgcccaggacgccgacggctgtcccatcgacatcaaggtgatccccaacggcgacggcaccttccgctgctcctacgtgcccaccaagcccattaagcacaccatcatcatctcctggggaggcgtaaacgtgcccaagagccccttccgggtgaacgtgggcgagggcagccaccccgagcgggtaaaggtgtacggccccggagtggagaagacaggcctcaaggccaatgagcccacctacttcacggtggactgcagcgaggcggggcaaggcgacgtgagcatcggcatcaagtgcgccccaggcgtggtgggccctgcagaggctgacattgacttcgacatcatcaagaatgacaacgacaccttcaccgtcaagtacacgccaccaggggcgggccgctacaccatcatggtgctgtttgccaaccaggagatccccgccagccccttccacatcaaggtggacccatcccacgatgccagcaaagtcaaggccgagggccctgggctgaatcgcacaggtgtggaagtcgggaagcccacccacttcacggtgctgaccaagggagccggcaaggccaagctggatgtgcagtttgcagggacagccaagggcgaggttgtgcgggactttgagatcatagacaaccatgactactcctacactgtcaagtacaccgctgtccagcagggcaacatggcagtgacagtgacttatggcggggaccctgtccccaagagcccctttgtggtgaatgtggcacccccgctggacctcagcaaaatcaaagttcagggccttaatagcaaggtggctgtgggacaggaacaagcattctctgtgaacacacgaggggctggcggtcagggccaactggatgtgcggatgacttcgccctctcgccggcccatcccctgcaagctggagccaggcggtggagcggaagcccaggctgtgcgctacatgcccccggaggaggggccctacaaggtggatatcacctacgatggtcacccggtgcctggcagcccgtttgctgtggagggtgtcctgccccctgatccctccaaggtctgtgcttatggcccgggtctcaagggtggactggtaggcacccccgcgccattctccatcgacaccaagggggctggcacaggtggcctggggctgaccgtagagggcccctgcgaggccaagatcgagtgccaggacaatggtgatggctcatgtgctgtcagctacctgcccacggagcctggcgagtacaccatcaacatcctgtttgctgaggcccacatccctggctcgcccttcaaagccaccattcggcctgtgtttgacccgagcaaggtgcgggccagtggaccgggcctggagcgcggcaaggtcggtgaggcagccaccttcactgtggactgctcagaggcaggcgaggcggagctgaccattgagatcctgtcggatgccggggtcaaggccgaggtgctgatccacaacaacgcggatggcacctaccacatcacctacagccctgccttccctggcacctacaccattaccatcaagtatggcgggcatcccgtgcccaaattccccacccgtgtccatgtgcagcctgcggtcgataccagtggcgtcaaggtctcagggcctggtgttgagccacacggtgtcctgcgggaggtgaccactgagttcactgtggatgcaagatccctaacagccacaggcggcaaccacgtgacggctcgtgtgctcaacccctcgggggccaagacagacacctatgtgacagacaatggggacggcacctaccgagtgcagtacaccgcctacgaggagggcgtgcatctggtggaggtcctgtatgatgaggtcgctgtgcccaagagccccttccgagtgggcgtgaccgagggctgtgatcccacccgcgtccgagccttcgggccaggcctggagggtggcttggtcaacaaggccaaccgattcactgtggagaccaggggagcgggcaccgggggccttggcctagccatcgagggtccctcggaagccaagatgtcctgcaaggacaacaaggatggtagctgcaccgtggagtacatccccttcactcctggagactatgacgtcaacatcaccttcggggggcggcccatcccagggagcccgttccgcgtgccagtgaaggatgtggtggaccctgggaaggtgaagtgctcagggccagggctgggggctggtgtcagggcccgggttcctcagaccttcacagtggactgcagtcaagctggccgggcgcccctgcaggtggctgtgctgggccccacaggtgtggccgagcctgtggaggtgcgggacaatggagatggcacccacactgtccactacaccccagccactgacgggccctacacggtagccgtcaagtatgctgaccaggaggtgccacgcagccccttcaagatcaaggtcctcccagctcatgatgccagcaaggtgcgggccagcggcccaggcctcaacgcctctggcatccctgccagcctgcctgtggagttcaccatcgacgcacgggacgcgggcgaggggttgctcactgtccagatcttggaccccgagggtaagcccaagaaggccaacatccgggacaatggggatggcacgtacactgtgtcctacctgccggacatgagtggccggtacaccatcaccatcaagtatggcggtgatgagatcccctactcgcccttccgcatccatgctctgcccactggggatgccagcaagtgcctcgtcacagtgtccattggaggccatggcctgggtgcctgcctgggccctcgaatccagattgggcaggagacggtgatcacggtggatgccaaggcagccggtgaggggaaggtgacatgcacggtgtccacgccggatggggcagagctcgatgtggatgtggttgagaaccatgacggtacctttgacatctactacacagcgcccgagccgggcaagtacgtcatcaccatccgcttcgggggtgagcacatccccaacagccccttccacgtgctggcgtgtgaccccctgccgcacgaggaggagccctctgaagtgccacagctgcgccagccctacgctcctccccggcccggcgcccgccccacacactgggccacagaggagccagtggtgcctgtggagccaatggagtccatgctgaggcccttcaacctggtcatccccttcgcggtgcagaaaggggagctcacaggagaggtgcggatgccctcggggaagacggcacggcccaacatcaccgacaacaaggacggcaccatcacggtgaggtatgcacccactgagaaaggcctgcaccagatggggatcaagtatgacggcaaccacatccctgggagccccttacagttctatgtggatgccatcaacagccgccatgtcagtgcctatgggccaggcctgagccatggcatggtcaacaagccagccaccttcactattgtcaccaaagatgctggagaagggggtctgtcactggccgtggagggcccatccaaggcagagatcacctgtaaggacaacaaggatggcacctgcaccgtgtcctatctgccgactgcgcctggagactacagcatcatcgtgcgcttcgatgacaagcacatcccggggagccccttcacagccaagatcacaggtgatgactccatgaggacctcacagctgaatgtgggcacctccacggacgtgtcactgaagatcaccgagagtgatctgagccagctgaccgccagcatccgtgccccctcgggcaacgaggagccctgcctgctgaagcgcctgcccaaccggcacattgggatctccttcacccccaaggaggtcggggagcacgtggtgagcgtgcgcaagagtggcaagcatgtcaccaacagccccttcaagatcctggtggggccatctgagatcggggacgccagcaaggtgcgggtctggggcaaggggctttccgagggacacacattccaggtggcagagttcatcgtggacactcgcaatgcaggttatgggggcttggggctgagtattgaaggcccaagcaaggtggacatcaactgtgaggacatggaggacgggacatgcaaagtcacctactgccccaccgagcccggcacctacatcatcaacatcaagtttgctgacaagcacgtgcctggaagccccttcactgtgaaggtgaccggcgagggccgcatgaaggagagcatcacccggcggagacaggcaccttccatcgccaccatcggcagcacctgtgacctcaacctcaagatcccaggaaactggttccagatggtgtctgcccaggagcgcctgacacgcaccttcacacgcagcagccacacctacacccgcacggagcgcacggagatcagcaagacgcggggcggggagacaaagcgcgaggtgcgggtggaggagtccacccaggtcggcggggaccccttccctgctgtgtttggggacttcctgggccgggagcgcctgggatccttcggcagcatcacccggcagcaggagggtgaggccagctctcaggacatgactgcacaggtgaccagcccatcgggcaaggtggaagccgcagagatcgtcgagggcgaggacagcgcctacagcgtgcgctttgtgccccaggaaatggggccccatacggtcgctgtcaagtaccgtggccagcacgtgcccggcagcccctttcagttcactgtggggccgctgggtgaaggtggtgcccacaaggtgcgggccggaggcacagggctggagcgaggtgtggccggcgtgccagccgagttcagcatctggacccgggaggctggcgctgggggcctgtccattgctgtggagggtcctagcaaagcggagattgcatttgaggatcgcaaagatggctcctgcggcgtctcctatgtcgtccaggaaccaggtgactatgaggtctccatcaagttcaatgatgagcacatcccagacagcccctttgtggtgcctgtggcctccctctcggatgacgctcgccgtctcactgtcaccagcctccaggagacggggctcaaggtgaaccagccagcgtcctttgccgtgcagctgaacggtgcccggggcgtgattgatgcccgggtgcacacaccctcgggggctgtggaggagtgctacgtctctgagctggacagtgacaagcacaccatccgcttcatcccccacgagaatggcgtccactccatcgatgtcaagttcaacggtgcccacatccctggaagtcccttcaagatccgcgttggggagcagagccaggctggggacccaggcttggtgtcagcctacggtcctgggctcgagggaggcactaccggtgtgtcatcagagttcatcgtgaacaccctgaatgccggctcgggggccttgtctgtcaccattgatggcccctccaaggtgcagctggactgtcgggagtgtcctgagggccatgtggtcacttatactcccatggcccctggcaactacctcattgccatcaagtacggtggcccccagcacatcgtgggcagccccttcaaggccaaggtcactggtccgaggctgtccggaggccacagccttcacgaaacatccacggttctggtggagactgtgaccaagtcctcctcaagccggggctccagctacagctccatccccaagttctcctcagatgccagcaaggtggtgactcggggccctgggctgtcccaggccttcgtgggccagaagaactccttcaccgtggactgcagcaaagcaggcaccaacatgatgatggtgggcgtgcacggccccaagaccccctgtgaggaggtgtacgtgaagcacatggggaaccgggtgtacaatgtcacctacactgtcaaggagaaaggggactacatcctcattgtcaagtggggtgacgaaagtgtccctggaagccccttcaaagtcaaggtcccttgaatcccaaaagtgcctccccagcctcagcccccacctccagccacacacacattacacacacacacacacacacacaaatgtgccacacccagacacgcacagaatcagacactacaaacacctgccttgggggtgaagtgaaggcccagcctccccaccccaccgcgccccaggggttggaggaccttgtctgtgtcaggacagtgtccctccctgggaatgtgacatgagggccgactggggccaggctcaggggcagaggctgggacacaaggggctggcgagggctgcgaggccagggaagccctgagtttctggcggggctgagcagtgggggagcattgtgttgtgggtgtctgtgtgtgaggtcaccctcaaactgcaccgccggccagataccctcctgaccccgaggacttggtctggtctctctggtggctacaaccccagagttttaaggacttggaaaggaaagcacaatcagagaagaaaacagcccccgaaccagcaggagtggcctggcacatggaccggcctgagcgatgtgcactccacccaagccaggctcccagggggcctgatttctctctcactgtctctttttttaaaatggttgcacggctctgccccatggggggccttttttacacactgcgaggcccagctttctaggggacttttgcacatgtcatgcagctcagctgggagctgcttaggtggaaaactccaaataaagtgcggctgtcgca

SEQ ID NO: 1286 - DNA, 871 bp, Homo sapiens
attttcataaacaatgaatggcacgatgccgtcagcaggaaaacattccccaccgtcaatccgtccactggagaggtcatctgtcaggtagctgaaggggacaaggaagatgtggacaaggcagtgaaggccgcccgggccgccttccagctgggctcaccttggcgccgcatggacgcatcacacaggggccggctgctgaaccgcctggccgatctgatcgagcgggaccggacctacctggcggccttggagaccctggacaatggcaagccctatgtcatctcctacctggtggatttggacatgctatgatgagtttgtggagcggagcgttgcccgggccaagtctcgggtggtcgggaacccctttgatagcaagaccgagcaggggccgcaggtggatgaaactcagtttaagaagatcctcggctacatcaacacggggaagcaagagggggcgaagctgctgtgtggtgggggcattgctgctgaccgtggttacttcatccagcccactgtgtttggagatgtgcaggatggcatgaccatcgccaaggaggagatcttcgggccagtgatgcagatcctgaagttcaagaccatagaggaggttgttgggagagccaacaattccacgtacgggctggccgcagctgtcttcacaaaggatttggacaaggccaattacctgtcccaggccctccaggcgggcactgtgtgggtcaactgctatgatgtgtttggagcccagtcaccctttggtggctacaagatgtcggggagtggccgggagttgggcgagtacgggctgcaggcatacactgaagtgaaaactgtcacagtcaaagtgcctcagaagaactcataa

SEQ ID NO: 1287 - DNA, 2050 bp, Homo sapiens
gactagctctgctctcggtccgctcgctgtccgctagcccgctgcgatgttgcgcgctgccgcccgcttcgggccccgcctgggccgccgcctcttgtcagccgccgccacccaggccgtgcctgcccccaaccagcagcccgaggtcttctgcaaccagattttcataaacaatgaatggcacgatgccgtcagcaggaaaacattccccaccgtcaatccgtccactggagaggtcatctgtcaggtagctgaaggggacaaggaagatgtggacaaggcagtgaaggccgcccgggccgccttccagctgggctcaccttggcgccgcatggacgcatcacacaggggccggctgctgaaccgcctggccgatctgatcgagcgggaccggacctacctggcggccttggagaccctggacaatggcaagccctatgtcatctcctacctggtggatttggacatggtcctcaaatgtctccggtattatgccggctgggctgataagtaccacgggaaaaccatccccattgacggagacttcttcagctacacacgccatgaacctgtgggggtgtgcgggcagatcattccgtggaatttcccgctcctgatgcaagcatggaagctgggcccagccttggcaactggaaacgtggttgtgatgaaggtagctgagcagacacccctcaccgccctctatgtggccaacctgatcaaggaggctggctttccccctggtgtggtcaacattgtgcctggatttggccccacggctggggccgccattgcctcccatgaggatgtggacaaagtggcattcacaggctccactgagattggccgcgtaatccaggttgctgctgggagcagcaacctcaagagagtgaccttggagctgggggggaagagccccaacatcatcatgtcagatgccgatatggattgggccgtggaacaggcccacttcgccctgttcttcaaccagggccagtgctgctgtgccggctcccggaccttcgtgcaggaggacatctatgatgagtttgtggagcggagcgttgcccgggccaagtctcgggtggtcgggaacccctttgatagcaagaccgagcaggggccgcaggtggatgaaactcagtttaagaagatcctcggctacatcaacacggggaagcaagagggggcgaagctgctgtgtggtgggggcattgctgctgaccgtggttacttcatccagcccactgtgtttggagatgtgcaggatggcatgaccatcgccaaggaggagatcttcgggccagtgatgcagatcctgaagttcaagaccatagaggaggttgttgggagagccaacaattccacgtacgggctggccgcagctgtcttcacaaaggatttggacaaggccaattacctgtcccaggccctccaggcgggcactgtgtgggtcaactgctatgatgtgtttggagcccagtcaccctttggtggctacaagatgtcggggagtggccgggagttgggcgagtacgggctgcaggcatacactgaagtgaaaactgtcacagtcaaagtgcctcagaagaactcataagaatcatgcaagcttcctccctcagccattgatggaaagttcagcaagatcagcaacaaaaccaagaaaaatgatccttgcgtgctgaatatctgaaaagagaaatttttcctacaaaatctcttgggtcaagaaagttctagaatttgaattgataaacatggtgggttggctgagggtaagagtatatgaggaaccttttaaacgacaacaatactgctagctttcaggatgatttttaaaaaatagattcaaatgtgttatcctctctctgaaacgcttcctataactcgagtttataggggaagaaaaagctattgtttacaattatatccccattaaggcaactgctacaccctgctttgtattctgggctaagattcattaaaaactagctgctcttaaaaaaaaaaaaaaaaaaaaaaaaaaaaaaaaaaaaaaaaaaaaaaa

SEQ ID NO: 1288 - DNA, 2280 bp, Homo sapiens
cagggggcagccacgggccgggggtacctagcgccacccgcttcgcttgcatcagctgcgcgccccatcccgaggaatggtagaggcagccccgcccccggcccgcccccgcctttccattggctgccgcgcggggcggggagcggggtcggctcagtggccctgagaccctagctctgctctcggtccgctcgctgtccgctagcccgctgcgatgttgcgcgctgccgcccgcttcgggccccgcctgggccgccgcctcttgtcagccgccgccacccaggccgtgcctgcccccaaccagcagcccgaggtcttctgcaaccagtctagattgaaaatgtcaactccagacatcactgtgcttctggaaactataaagaggaagtgggagctaggacatccccccaccacgccccgcccaagagcgtttacgtgtgttatattttcataaacaatgaatggcacgatgccgtcagcaggaaaacattccccaccgtcaatccgtccactggagaggtcatctgtcaggtagctgaaggggacaaggaagatgtggacaaggcagtgaaggccgcccgggccgccttccagctgggctcaccttggcgccgcatggacgcatcacacaggggccggctgctgaaccgcctggccgatctgatcgagcgggaccggacctacctggcggccttggagaccctggacaatggcaagccctatgtcatctcctacctggtggatttggacatggtcctcaaatgtctccggtattatgccggctgggctgataagtaccacgggaaaaccatccccattgacggagacttcttcagctacacacgccatgaacctgtgggggtgtgcgggcagatcattccgtggaatttcccgctcctgatgcaagcatggaagctgggcccagccttggcaactggaaacgtggttgtgatgaaggtagctgagcagacacccctcaccgccctctatgtggccaacctgatcaaggaggctggctttccccctggtgtggtcaacattgtgcctggatttggccccacggctggggccgccattgcctcccatgaggatgtggacaaagtggcattcacaggctccactgagattggccgcgtaatccaggttgctgctgggagcagcaacctcaagagagtgaccttggagctgggggggaagagccccaacatcatcatgtcagatgccgatatggattgggccgtggaacaggcccacttcgccctgttcttcaaccagggccagtgctgctgtgccggctcccggaccttcgtgcaggaggacatctatgatgagtttgtggagcggagcgttgcccgggccaagtctcgggtggtcgggaacccctttgatagcaagaccgagcaggggccgcaggtggatgaaactcagtttaagaagatcctcggctacatcaacacggggaagcaagagggggcgaagctgctgtgtggtgggggcattgctgctgaccgtggttacttcatccagcccactgtgtttggagatgtgcaggatggcatgaccatcgccaaggaggagatcttcgggccagtgatgcagatcctgaagttcaagaccatagaggaggttgttgggagagccaacaattccacgtacgggctggccgcagctgtcttcacaaaggatttggacaaggccaattacctgtcccaggccctccaggcgggcactgtgtgggtcaactgctatgatgtgtttggagcccagtcaccctttggtggctacaagatgtcggggagtggccgggagttgggcgagtacgggctgcaggcatacactgaagtcacagtcaaagtgcctcagaagaactcataagaatcatgcaagcttcctccctcagccattgatggaaagttcagcaagatcagcaacaaaaccaagaaaaatgatccttgcgtgctgaatatctgaaaagagaaatttttcctacaaaatctcttgggtcaagaaagttctagaatttgaattgataaacatggtgggttggctgagggtaagagtatatgaggaaccttttaaacgacaacaatactgctagctttcaggatgatttttaaaaaatagattcaaatgtgttatcctctctctgaaacgcttcctataactcgagtttataggggaagaaaaagctattgtttacaattatatcaccattaaggcaactgctacaccctgctttgtattctgggctaagattcattaaaaactagctgctcttaa

SEQ ID NO: 1289 - DNA, 2173 bp, Homo sapiens
cagggggcagccacgggccgggggtacctagcgccacccgcttcgcttgcatcagctgcgcgccccatcccgaggaatggtagaggcagccccgcccccggcccgcccccgcctttccattggctgccgcgcggggcggggagcggggtcggctcagtggccctgagaccctagctctgctctcggtccgctcgctgtccgctagcccgctgcgatgttgcgcgctgccgcccgcttcgggccccgcctgggccgccgcctcttgtcagccgccgccacccaggccgtgcctgcccccaaccagcagcccgaggtcttctgcaaccagattttcataaacaatgaatggcacgatgccgtcagcaggaaaacattccccaccgtcaatccgtccactggagaggtcatctgtcaggtagctgaaggggacaaggaagatgtggacaaggcagtgaaggccgcccgggccgccttccagctgggctcaccttggcgccgcatggacgcatcacacaggggccggctgctgaaccgcctggccgatctgatcgagcgggaccggacctacctggcggccttggagaccctggacaatggcaagccctatgtcatctcctacctggtggatttggacatggtcctcaaatgtctccggtattatgccggctgggctgataagtaccacgggaaaaccatccccattgacggagacttcttcagctacacacgccatgaacctgtgggggtgtgcgggcagatcattccgtggaatttcccgctcctgatgcaagcatggaagctgggcccagccttggcaactggaaacgtggttgtgatgaaggtagctgagcagacacccctcaccgccctctatgtggccaacctgatcaaggaggctggctttccccctggtgtggtcaacattgtgcctggatttggccccacggctggggccgccattgcctcccatgaggatgtggacaaagtggcattcacaggctccactgagattggccgcgtaatccaggttgctgctgggagcagcaacctcaagagagtgaccttggagctgggggggaagagccccaacatcatcatgtcagatgccgatatggattgggccgtggaacaggcccacttcgccctgttcttcaaccagggccagtgctgctgtgccggctcccggaccttcgtgcaggaggacatctatgatgagtttgtggagcggagcgttgcccgggccaagtctcgggtggtcgggaacccctttgatagcaagaccgagcaggggccgcaggtggatgaaactcagtttaagaagatcctcggctacatcaacacggggaagcaagagggggcgaagctgctgtgtggtgggggcattgctgctgaccgtggttacttcatccagcccactgtgtttggagatgtgcaggatggcatgaccatcgccaaggaggagatcttcgggccagtgatgcagatcctgaagttcaagaccatagaggaggttgttgggagagccaacaattccacgtacgggctggccgcagctgtcttcacaaaggatttggacaaggccaattacctgtcccaggccctccaggcgggcactgtgtgggtcaactgctatgatgtgtttggagcccagtcaccctttggtggctacaagatgtcggggagtggccgggagttgggcgagtacgggctgcaggcatacactgaagtgaaaactgtcacagtcaaagtgcctcagaagaactcataagaatcatgcaagcttcctccctcagccattgatggaaagttcagcaagatcagcaacaaaaccaagaaaaatgatccttgcgtgctgaatatctgaaaagagaaatttttcctacaaaatctcttgggtcaagaaagttctagaatttgaattgataaacatggtgggttggctgagggtaagagtatatgaggaaccttttaaacgacaacaatactgctagctttcaggatgatttttaaaaaatagattcaaatgtgttatcctctctctgaaacgcttcctataactcgagtttataggggaagaaaaagctattgtttacaattatatcaccattaaggcaactgctacaccctgctttgtattctgggctaagattcattaaaaactagctgctcttaa

SEQ ID NO: 1290 - DNA, 2506 bp, Homo sapiens
tggtggcgggcgcctgtagtcccagccacccgggaggctgaggcaggagaatggtgtgaacccgggaggcggagcttgcagtgagctgagatcgtgccactgcactccacgcactgctcttcccggtcatggaggcgccagccgccggcttgtttctgctcctgttgcttgggacttgggccccggcgccgggcagcgcctcctccgaggcaccgccgctgatcaatgaggacgtgaagcgcacagtggacctaagcagccacctggctaaggtgacggccgaggtggtcctggcgcacctgggcggcggctccacgtcccgagctacctctttcctgctggctttggagcctgagctcgaggcccggctggcgcacctgggcgtgcaggtaaagggagaagatgaggaagagaacaatttggaagtacgtgaaaccaaaattaagggtaaaagtgggagattcttcacagtcaagctcccagttgctcttgatcctggggccaagatttcagtcattgtggaaacagtctacacccatgtgcttcatccgtatccaacccagatcacccagtcagagaaacagtttgtggtgtttgaggggaaccattatttctactctccctatccaacgaagacacaaaccatgcgtgtgaagcttgcctctcgaaatgtggagagctacaccaagctggggaaccccacgcgctctgaggacctactggattatgggcctttcagagatgtgcctgcctatagtcaggatacttttaaagtacattatgagaacaacagccctttcctgaccatcaccagcatgacccgagtcattgaagtctctcactggggtaatattgctgtggaagaaaatgtggacttaaagcacacaggagctgtgcttaaggggcctttctcacgctatgattaccagagacagccagatagtggaatatcctccatccgttcttttaagaccatccttcctgctgctgcccaggatgtttattaccgggatgagattggcaatgtttctaccagccacctccttattttggatgactctgtagagatggaaatccggcctcgcttccctctctttggcgggtggaagacccattacatcgttggctacaacctcccaagctatgagtacctctataatttgggtgaccagtatgcactgaagatgaggtttgtggaccatgtgtttgatgaacaagtgatagattctctgactgtgaagatcatcctgcctgaaggagccaagaacattgaaattgatagtccctatgaaatcagccgtgccccagatgagctgcactacacctatctggacacatttggccgccctgtgattgttgcctacaagaaaaatctggtagaacagcacattcaggacattgtggtccactacacgttcaacaaggtgctcatgctgcaggagcccctgctggtggtggcggccttctacatcctgttcttcaccgttatcatctatgttcggctggacttctccatcaccaaggatccagccgcagaagccaggatgaaggtagcctgcatcacagagcaggtcttgaccctggtcaacaagagaataggcctttaccgtcactttgacgagaccgtcaataggtacaagcaatcccgggacatctccaccctcaacagtggcaagaagagcctggagactgaacacaaggccttgaccagtgagattgcactgctgcagtccaggctgaagacagagggctctgatctgtgcgacagagtgagcgaaatgcagaagctggatgcacaggtcaaggagctggtgctgaagtcggcggtggaggctgagcgcctggtggctggcaagctcaagaaagacacgtacattgagaatgagaagctcatctcaggaaagcgccaggagctggtcaccaagatcgaccacatcctggatgccctgtagcccctgcccgcatcctccagggggcccagggtgcctgcactttgctgtggcaggcagattgggtggtagtgggaggttgtgcatggaggccagtgaaagctgacatctgtaaaaggccttcaaggaagagaaaccaggccctgcgtcaggcagtgtgagtttgccgtttgtccttaactttctttttttttttttttaaaaaaagaaaactttaaaaaaactcccattaaaaacaaaacatctttgtgttttgaacaaaggaattttcaatatttgattggtattctgttctgaagtctaagatatttttcagcctataaagccccctgttttatgcccttctaattctgatgtttgggtattgtgtgagtgcatgtgtttttttttttttttttaaagcgtgtgtgaacaaatggaaataaagcagggactgtgaacatttgtttttggtctgttgaagatctctcataatttaattcttaattttgggaatagtgcttttatcaagtgctttttattcattaaataatggatttgcttctcagcaggtttgc

SEQ ID NO: 1291 - DNA, 2334 bp, Homo sapiens
gggccctacccgccctggcgcactgctcttcccggtcatggaggcgccagccgccggcttgtttctgctcctgttgcttgggacttgggccccggcgccgggcagcgcctcctccgaggcaccgccgctgatcaatgaggacgtgaagcgcacagtggacctaagcagccacctggctaaggtgacggccgaggtggtcctggcgcacctgggcggcggctccacgtcccgagctacctctttcctgctggctttggagcctgagctcgaggcccggctggcgcacctgggcgtgcaggtaaagggagaagatgaggaagagaacaatttggaagtacgtgaaaccaaaattaagggtaaaagtgggagattcttcacagtcaagctcccagttgctcttgatcctggggccaagatttcagtcattgtggaaacagtctacacccatgtgcttcatccatatccaacccagatcacccagtcagagaaacagtttgtggtgtttgaggggaaccattatttctactctccctatccaacgaagacacaaaccatgcgtgtgaagcttgcctctcgaaatgtggagagctacaccaagctggggaaccccacgcgctctgaggacctactggattatgggcctttcagagatgtgcctgcctatagtcaggatacttttaaagtacattatgagaacaacagccctttcctgaccatcaccagcatgacccgagtcattgaagtctctcactggggtaatattgctgtggaagaaaatgtggacttaaagcacacaggagctgtgcttaaggggcctttctcacgctatgattaccagagacagccagatagtggaatatcctccatccgttcttttaagaccatccttcctgctgctgcccaggatgtttattaccgggatgagattggcaatgtttctaccagccacctccttattttggatgactctgtagagatggaaatccggcctcgcttccctctctttggcgggtggaagacccattacatcgttggctacaacctcccaagctatgagtacctctataatttgggtgaccagtatgcactgaagatgaggtttgtggaccatgtgtttgatgaacaagtgatagattctctgactgtgaagatcatcctgcctgaaggagccaagaacattgaaattgatagtccctatgaaatcagccgtgccccagatgagctgcactacacctatctggatacatttggccgccctgtgattgttgcctacaagaaaaatctggtagaacagcacattcaggacattgtggtccactacacgttcaacaaggtgctcatgctgcaggagcccctgctggtggtggcggccttctacatcctgttcttcaccgttatcatctatgttcggctggacttctccatcaccaaggatccagccgcagaagccaggatgaaggtagcctgcatcacagagcaggtcttgaccctggtcaacaagagaataggcctttaccgtcactttgacgagaccgtcaataggtacaagcaatcccgggacatctccaccctcaacagtggcaagaagagcctggagactgaacacaaggccttgaccagtgagattgcactgctgcagtccaggctgaagacagagggctctgatctgtgcgacagagtgagcgaaatgcagaagctggatgcacaggtcaaggagctggtgctgaagtcggcggtggaggctgagcgcctggtggctggcaagctcaagaaagacacgtacattgagaatgagaagctcatctcaggaaagcgccaggagctggtcaccaagatcgaccacatcctggatgccctgtagcccctgcccgcatcctccagggggcccagggtgcctgcactttgctgtggcaggcagattgggtggtagtgggaggttgtgcatggaggccagtgaaagctgacatctgtaaaaggccttcaaggaagagaaaccaggccctgcgtcaggcagtgtgagtttgccgtttgtccttaactttcttttttttttttttaaaaaagaaaactttaaaaaaactcccattaaaaacaaaacatctttgtgttttgaacaaaggaattttcaatatttgattggtattctgttctgaagtctaggatatttttcagcctataaagccccctgttttatgcccttctaattctgatgtttgggtattgtgtgagtgcatgtgttttttttttttttttttttaaagcgtgtgtgaacaaatggaaataaagcagggactgtgaacattaaaaaaaaaaaaaaaaaaaaaaaaaaaaaaa

SEQ ID NO: 1292 - DNA, 2275 bp, Homo sapiens
tggtggcgggcgcctgtagtcccagccacccgggaggctgaggcaggagaatggtgtgaacccgggaggcggagcttgcagtgagctgagatcgtgccactgcactccacgcactgctcttcccggtcatggaggcgccagccgccggcttgtttctgctcctgttgcttgggacttgggccccggcgccgggcagcgcctcctccgaggcaccgccgctgatcaatgaggacgtgaagcgcacagtggacctaagcagccacctggctaaggtgacggccgaggtggtcctggcgcacctgggcggcggctccacgtcccgagctacctctttcctgctggctttggagcctgagctcgaggcccggctggcgcacctgggcgtgcaggtaaagggagaagatgaggaagagaacaatttggaagtacgtgaaaccaaaattaagggtaaaagtgggagattcttcacagtcaagctcccagttgctcttgatcctggggccaagatttcagtcattgtggaaacagtctacacccatgtgcttcatccgtatccaacccagatcacccagtcagagaaacagtttgtggtgtttgaggggaaccattatttctactctccctatccaacgaagacacaaaccatgcgtgtgaagcttgcctctcgaaatgtggagagctacaccaagctggggaaccccacgcgctctgaggacctactggattatgggcctttcagagatgtgcctgcctatagtcaggatacttttaaagtacattatgagaacaacagccctttcctgaccatcaccagcatgacccgagtcattgaagtctctcactggggtaatattgctgtggaagaaaatgtggacttaaagcacacaggagctgtgcttaaggggcctttctcacgctatgattaccagagacagccagatagtggaatatcctccatccgttcttttaagaccatccttcctgctgctgcccaggatgtttattaccgggatgagattggcaatgtttctaccagccacctccttattttggatgactctgtagagatggaaatccggcctcgcttccctctctttggcgggtggaagacccattacatcgttggctacaacctcccaagctatgagtacctctataatttgggtgaccagtatgcactgaagatgaggtttgtggaccatgtgtttgatgaacaagtgatagattctctgactgtgaagatcatcctgcctgaaggagccaagaacattgaaattgatagtccctatgaaatcagccgtgccccagatgagctgcactacacctatctggacacatttggccgccctgtgattgttgcctacaagaaaaatctggtagaacagcacattcaggacattgtggtccactacacgttcaacaaggtgctcatgctgcaggagcccctgctggtggtggcggccttctacatcctgttcttcaccgttatcatctatgttcggctggacttctccatcaccaaggatccagccgcagaagccaggatgaaggtagcctgcatcacagagcaggtcttgaccctggtcaacaagagaataggcctttaccgtcactttgacgagaccgtcaataggtacaagcaatcccgggacatctccaccctcaacagtggcaagaagagcctggagactgaacacaaggccttgaccagtgagattgcactgctgcagtccaggctgaagacagagggctctgatctgtgcgacagagtgagcgaaatgcagaagctggatgcacaggtcaaggagctggtgctgaagtcggcggtggaggctgagcgcctggtggctggcaagctcaagaaagacacgtacattgagaatgagaagctcatctcaggaaagcgccaggagctggtcaccaagatcgaccacatcctggatgccctgtagcccctgcccgcatcctccagggggcccagggtgcctgcactttgctgtggcaggcagattgggtggtagtgggaggttgtgcatggaggccagtgaaagctgacatctgtaaaaggccttcaaggaagagaaaccaggccctgcgtcaggcagtgtgagtttgccgtttgtccttaactttctttaagaaaactttaaaaaaactcccattaaaaacaaaacatctttgtgttttgaacaaaggaattttcaatatttgattggtattctgttctgaagtctaagatatttttcagcctataaagccccctgttttatgccct

SEQ ID NO: 1293 - DNA, 3677 bp, Homo sapiens
cgcggcggctgttattgttcggctgggctcggtcgggcgctgtctccctcggctctgcgggtgtcagttcgtccggcttcctcacagcccctcactcccggcggctgacagcagcagcggcggcggcgggaggagcagcagcgggaggaggagccgtgtgccctggcactgagcggccgcggccatggcgtacgcctatctcttcaagtacatcataatcggcgacacaggtgttggtaaatcatgcttattgctacagtttacagacaagaggtttcagccagtgcatgaccttactattggtgtagagttcggtgctcgaatgataactattgatgggaaacagataaaacttcagatatgggatacggcagggcaagaatcctttcgttccatcacaaggtcgtattacagaggtgcagcaggagctttactagtttacgatattacacggagagatacattcaaccacttgacaacctggttagaagatgcccgccagcattccaattccaacatggtcattatgcttattggaaataaaagtgatttagaatctagaagagaagtaaaaaaagaagaaggtgaagcttttgcacgagaacatggactcatcttcatggaaacgtctgctaagactgcttccaatgtagaagaggcatttattaatacagcaaaagaaatttatgaaaaaattcaagaaggagtctttgacattaataatgaggcaaatggcattaaaattggccctcagcatgctgctaccaatgcaacacatgcaggcaatcagggaggacagcaggctgggggcggctgctgttgagtctgtttttactgtctagctgcccaacggggcctactcacttattctttcaccccctctcctcctgctcagctgagacatgaaactatttgaaatggctttatgtcacagaagactttaatccgtcaaattcttgtataactttgaataaatggttaatgttcacttaaaagacagattttggagattgtattcatatctatttgcatttgatttctaggtcaattgatgtgattatttttgttaaatgttgtcttgtgcccttaactacgaactgaattgtattaaacactacaaagtcatcttgagtattttaaatcggtttgtgtagttaggtttcccaacatctgtggttacctaatgtttaatattatagaactgtcctcagaaactttgtcaattttcacggctataaggaaacagaaggactcttttaattctgtatttatcatttactttctgtatatatagtttaataacctgcttgggtgtaatttgccaagcttgaattctttaatgcatttgcataaattctatactgtttagagcttaaagctacagaagcattgttaggaattgcttggacactgaattttaaactttttgacattgttaacaagcatgttcatcttttcttgtcactagtccaagaaaaatatgcttaatgtatattacaaaggctttgtatatgttaacctgttttaatgccaaaagtttgctttgtccacaatttccttaagacctcttcagaaagggatttgtttgccttaatgaatactgttgggaaaaaacacagtataatgagtgaaaagggcagaagcaagaaatttctacatcttagcgactccaagaagaatgagtatccacatttagatggcacattatgaggactttaatctttccttaaacacaataatgttttcttttttcttttattcacatgatttctaagtatatttttcatgcaggacagtttttcaaccttgatgtacagtgactgtgtaaaatttttctttcagtggcaacctctataatctttaaaatatggtgagcatcttgtctgttttgaaggggatatgacaataaatctatcagatgggaaatcctgttacaaagtagaaaagctttagtaatttactcagtgtggtggttttatcctttttttctttttctcccttggtctataatgaaattgttacagcagtgcaaaataaaatcctatgtataaaagtgttctttttttttattatgaccacctcttttttaatgtatttttagtccacttacagcttttacatgggtttaagcatgttttttaaaagggtcagaatggttaacactcaaccctttttaaaaattttgctaaaatgcgacaaatctcaccatactgaaattatttttgttgatggtgtaagcagtgtaagcaagtgttttctcctgaactagcacaaaagcacttatgcctgaaagaaagcataaagaagttctaactctgaaactaactactttcatttcgctcatggccttcaactttctacaggtcttccctgaagattcagcagtactctctcaaaggtttgacagtactcttgtgggaaatcaccaaatgctgtcatagttttgttttaactgtctccttgagggcagagggaagggtgagagaaaatctgttttcatgggtatttgtagtacagcctttttttctttcaagtggctgtatcaaattcactggtcttactaatcactgtctttaccagtgagtacaaaaagttaaggcaactaggacaggtactgctgtataccaagaagagaatgattctttggaaattgttatttttaagcttctgttaatttttccagaagtttagtgcgtttcttttccatactttctcccctaattcttttatttgaagaagagaacttaatggcaaataaacaacaaaccaggacatgcattttaataccctaaggaaaaatggaaccctcaaatataactcctcccacaaccaccctaatgtgcctcagtctggggcagcaggtggacttctcaatagttcttttccacattctctacaaatcacatctaccgttaaggaatatgttatgaatcctttctgttaattgagaaagcaatgttattgtctgtgatttccagtctttgctcattttattatccctgtcaaataatgtaatattggtacctgcagttgaatttgtaatattgtaattgaatttttagttgatcttcgatcagtttttatagcatctatggacatagaaaatcagtcactgaaaaaaataaacacagctttcaatgtctcactcaacatgtaacattcaaaattgtgatcttcataaagacattgttaccattcgtcttgcaaatttaagacaactgaatgaaaagccaattttttgaaagaatgtggcatataattagatatacaactgaaacaggatatacaactgcatacaatttgtttttaatgatattttaaaatagcctgttagcaggaaaatagtccctatttatctgctaatggtcaaaaagagttaggatataaatcgtaccaaaatgtttccaatcactcagaaaaactgattcatgtctggctttgcaacaccttaaacatttattctgtcatagatagtaaagccccatctcagtttatttagtcctgaggttggcagcatggggtttgactatatgagctaaaagatacacaaagagataacgctgtttcataataaacaggaattgactatacaaataggtaaaccagcatatctacctgtatttctcagagtttagatgtgtgctttatgtttacattaaaataaagcctaacgccac

SEQ ID NO: 1294 - DNA, 639 bp, Homo sapiens
atggcgtacgcctatctcttcaagtacatcataatcggcgacacaggtgttggtaaatcatgcttattgctacagtttacagacaagaggtttcagccagtgcatgaccttactattggtgtagagttcggtgctcgaatgataactattgatgggaaacagataaaacttcagatatgggatacggcagggcaagaatcctttcgttccatcacaaggtcgtattacagaggtgcagcaggagctttactagtttacgatattacacggagagatacattcaaccacttgacaacctggttagaagatgcccgccagcattccaattccaacatggtcattatgcttattggaaataaaagtgatttagaatctagaagagaagtaaaaaaagaagaaggtgaagcttttgcacgagaacatggactcatcttcatggaaacgtctgctaagactgcttccaatgtagaagaggcatttattaatacagcaaaagaaatttatgaaaaaattcaagaaggagtctttgacattaataatgaggcaaatggcattaaaattggccctcagcatgctgctaccaatgcaacacatgcaggcaatcagggaggacagcaggctgggggcggctgctgttga

SEQ ID NO: 1295 - DNA, 2309 bp, Homo sapiens
agaagaagatcggtagattgagtggctagagaggtcggaggtaagtggctatagaagtcgggcggacccggaacccagaggacgcgacaccatgacttatgcttatctcttcaagtatatcatcatcggagacacaggtgtggggaagtcatgtctcctcctgcagtttacagataagcggttccagcctgtccacgacctcacaataggtgtggagtttggagctcgtatggtcaacattgatggaaaacaaatcaaactgcaaatctgggatacggctgggcaagaatccttccgttctatcacccgttcctactacaggggagcagctggagcactgctggtgtacgacattacaaggcgtgaaaccttcaaccacctgacctcatggttagaggatgcccggcagcactctagttccaacatggttatcatgctcattgggaataagagtgacctagagtcccgcagggatgtgaagagagaagaaggagaggcctttgctagggagcatggacttatattcatggaaacttcagccaaaacagcctgcaatgttgaagaggccttcattaacacagccaaagaaatatataggaagatccagcagggtttatttgatgtccacaatgaggcaaatggcatcaagattgggccccaacagtcaatttcaacatcagtgggacccagtgcctcccagcggaactctcgtgacatagggtccaactctggctgctgctgaacatctggcttgaactttttttgtccttcctggaatagcttcagatcaataggcttaatgaaagaggtctttcttgctttggctgagagcagcctctttttaaagtgtgatgttttgcctttccacctaaagaccaggagagaatttgggcccttactgacctgtcctccttcagggacatgagcattccctatagattagggttcttcttatcctcctatacaaatttcttaaattgttaggatcaaatgctggattacaggtgtgagccaccgtgcctggcctaaataaataatttcgtaagcatatacaatccacttcccactaagaattagggtcaaagacattctatttgaacacttgcaattacctagatctagttggcctttggttgatagatcctctgcctcggaatttcattgagtttttttcttccttgcctttgggtgtctgcttgccacttcctaagaattcttgtagaaggcagtttcctctacttgcccaagagcactgagtacttctctactatcctattattagcttctatctcttagtgtaacttcaaaacttttaagagcagtgaagttggtcagggacatgtggccacttattattacctaaagaaaacatttgttccctgttcattttattttaggggccagatctaacattgtagtgtctttcaccagatagacttctactgtttcatcaaactcccttcttaactagacctagactttctactccaatcaggctaatctacttactgaatgtgacatatttattcctagttccatacctttgcacatgccctactctccactaattatacttaaaagtccaaaaattttttctttagtaacagacttaggtactgctaagcagttattaacacaatattccttagttttcatatgttggttattcatatgtctatttatatgtatatttatttttatgtatgttactatgtaaatatggtttgcagttgtttttgtgtggaatcttgtctttccgtataagttgtaagctccttgagagcaggatccatgtcattcctttatttttataaattattccccctatcattcctttacagtgcctagtgctactcattatgtgttcattgaatttgactgacatagttaaaaacttaaggtttattttagactttcaaggaaacaaaagactttagagtcctctctctgtaattctgccccactcatttgtttaccctgggttttatacagttctcttccttctcccctcccacctttccctggctttttgcctccattccatgaggcatacagtaaggctgcctgctagtaagcagtcacataagtgggtacctatccagccattctcttttcagagcatataatactatcttagccaaacttgcctttgcttcactcatcatgcagccttctgggttggttgctatatatatcttttttccttgatgtcccattctcttccacagccctgaggtcttacgaatttttctactttctttttgctgttgatgaattgtttcattattaaatatatgcatgtatcaaag

SEQ ID NO: 1296 - DNA, 3787 bp, Homo sapiens
ctccggcggcgccggcggccgcagaacttccgggtcggcgcggaggcggggcggaggcgccgcggcggctgttattgttcggctgggctcggtcgggcgctgtctccctcggctctgcgggtgtcagttcgtccggcttcctcacagcccctcactcccggcggctgacagcagcagcggcggcggcgggcggcgcctggcgtttcgaggctgagcggcaccggggttggggcgcggaggaggagcagcagcgggaggaggagccgtgtgccctggcactgagcggccgcggccatggcgtacgcctatctcttcaagtacatcataatcggcgacacaggtgttggtaaatcatgcttattgctacagtttacagacaagaggtttcagccagtgcatgaccttactattggtgtagagttcggtgctcgaatgataactattgatgggaaacagataaaacttcagatatgggatacggcagggcaagaatcctttcgttccatcacaaggtcgtattacagaggtgcagcaggagctttactagtttacgatattacacggagagatacattcaaccacttgacaacctggttagaagatgcccgccagcattccaattccaacatggtcattatgcttattggaaataaaagtgatttagaatctagaagagaagtaaaaaaagaagaaggtgaagcttttgcacgagaacatggactcatcttcatggaaacgtctgctaagactgcttccaatgtagaagaggcatttattaatacagcaaaagaaatttatgaaaaaattcaagaaggagtctttgacattaataatgaggcaaatggcattaaaattggccctcagcatgctgctaccaatgcaacacatgcaggcaatcagggaggacagcaggctgggggcggctgctgttgagtctgtttttactgtctagctgcccaacggggcctactcacttattctttcaccccctctcctcctgctcagctgagacatgaaactatttgaaatggctttatgtcacagaagactttaatccgtcaaattcttgtataactttgaataaatggttaatgttcacttaaaagacagattttggagattgtattcatatctatttgcatttgatttctaggtcaattgatgtgattatttttgttaaatgttgtcttgtgcccttaactacgaactgaattgtattaaacactacaaagtcatcttgagtattttaaatcggtttgtgtagttaggtttcccaacatctgtggttacctaatgtttaatattatagaactgtcctcagaaactttgtcaattttcacggctataaggaaacagaaggactcttttaattctgtatttatcatttactttctgtatatatagtttaataacctgcttgggtgtaatttgccaagcttgaattctttaatgcatttgcataaattctatactgtttagagcttaaagctacagaagcattgttaggaattgcttggacactgaattttaaactttttgacattgttaacaagcatgttcatcttttcttgtcactagtccaagaaaaatatgcttaatgtatattacaaaggctttgtatatgttaacctgttttaatgccaaaagtttgctttgtccacaatttccttaagacctcttcagaaagggatttgtttgccttaatgaatactgttgggaaaaaacacagtataatgagtgaaaagggcagaagcaagaaatttctacatcttagcgactccaagaagaatgagtatccacatttagatggcacattatgaggactttaatctttccttaaacacaataatgttttcttttttcttttattcacatgatttctaagtatatttttcatgcaggacagtttttcaaccttgatgtacagtgactgtgtaaaatttttctttcagtggcaacctctataatctttaaaatatggtgagcatcttgtctgttttgaaggggatatgacaataaatctatcagatgggaaatcctgttacaaagtagaaaagctttagtaatttactcagtgtggtggttttatcctttttttctttttctcccttggtctataatgaaattgttacagcagtgcaaaataaaatcctatgtataaaagtgttctttttttttattatgaccacctcttttttaatgtatttttagtccacttacagcttttacatgggtttaagcatgttttttaaaagggtcagaatggttaacactcaaccctttttaaaaattttgctaaaatgcgacaaatctcaccatactgaaattatttttgttgatggtgtaagcagtgtaagcaagtgttttctcctgaactagcacaaaagcacttatgcctgaaagaaagcataaagaagttctaactctgaaactaactactttcatttcgctcatggccttcaactttctacaggtcttccctgaagattcagcagtactctctcaaaggtttgacagtactcttgtgggaaatcaccaaatgctgtcatagttttgttttaactgtctccttgagggcagagggaagggtgagagaaaatctgttttcatgggtatttgtagtacagcctttttttctttcaagtggctgtatcaaattcactggtcttactaatcactgtctttaccagtgagtacaaaaagttaaggcaactaggacaggtactgctgtataccaagaagagaatgattctttggaaattgttatttttaagcttctgttaatttttccagaagtttagtgcgtttcttttccatactttctcccctaattcttttatttgaagaagagaacttaatggcaaataaacaacaaaccaggacatgcattttaataccctaaggaaaaatggaaccctcaaatataactcctcccacaaccaccctaatgtgcctcagtctggggcagcaggtggacttctcaatagttcttttccacattctctacaaatcacatctaccgttaaggaatatgttatgaatcctttctgttaattgagaaagcaatgttattgtctgtgatttccagtctttgctcattttattatccctgtcaaataatgtaatattggtacctgcagttgaatttgtaatattgtaattgaatttttagttgatcttcgatcagtttttatagcatctatggacatagaaaatcagtcactgaaaaaaataaacacagctttcaatgtctcactcaacatgtaacattcaaaattgtgatcttcataaagacattgttaccattcgtcttgcaaatttaagacaactgaatgaaaagccaattttttgaaagaatgtggcatataattagatatacaactgaaacaggatatacaactgcatacaatttgtttttaatgatattttaaaatagcctgttagcaggaaaatagtccctatttatctgctaatggtcaaaaagagttaggatataaatcgtaccaaaatgtttccaatcactcagaaaaactgattcatgtctggctttgcaacaccttaaacatttattctgtcatagatagtaaagccccatctcagtttatttagtcctgaggttggcagcatggggtttgactatatgagctaaaagatacacaaagagataacgctgtttcataataaacaggaattgactatacaaataggtaaaccagcatatctacctgtatttctcagagtttagatgtgtgctttatgtttacattaaaataaagcctaacgccac

SEQ ID NO: 1297 - DNA, 1482 bp, Homo sapiens
gtcggaggtaagtggctatagaagtcgggcggacccggaacccagaggacgcgacaccatgacttatgcttatctcttcaagtatatcatcatcggagacacaggtaaccctcaggtggttcgccttcaaggctcgggcgggcattcgaagctcccaaattgggtggcgggggcggggctcactttgtgggctgggcgattcgagacgggcggggcggttcggggcggccgggggcggggctcgggagccccccttctctggtccgggaagtccatactctggaaggtgttccagggctgcgtgattccgggagtgtgctttctctttcaggtgtggggaagtcatgtctcctcctgcagtttacagataagcggttccagcctgtccacgacctcacaataggtaagtgcatctacttgttccagaacagatgataaaacctgactagctaaattgctaaagtggaaagttagcagccttcagtgttcgaagtaaaaagttacccctcactactttaaactagtccaaacttatgttaatgaagtgaccaatgaaacgttgatatgtggggagtagtgtaagggagagtatataattgaaaggtaactttttagagtgtgaggtatagactcgtcatataattttttttcaaatacaatttgtatgtttatggaaaatcccacgaaagcataactgcttatttatgaactcatctgtgctttgaggtaaattaataccagccttacttttaaaaagtaaacaccaatacatggacattttttatattggtgaagaagcaaattgaggagtcatccctgccttagaattaataggcaaataaaactaaaaactttccttttaaatgaaagagtgtgttaacagttcctcaaacgcactggcgatcctggaaaatactaacctttcccacacgtttgtgataaggcatggcctgaagaggcttttaactaccccctcttcgttatctccgtaaccccagtccaaataaacaacatatatgaaactagctttcttgccatgcaaatgcagtttctaaataaacccctacatccccattcttaccatattgctacttccaagtcccacctgtatggaaacctgaagctaccactgttcctaacggatttatttagagtcaaataattgatggggttagaaaaggatttggcagtatcaactaaaaggtattttaaagggaatattgagcgaattctcactttgcgataggggctaatgatacaatgcttaacaaggcaacaatgcttaattgtgcctctggcaattattggaaatgtaaaatgtattgttaaaaaaattaggtgggcgttgtggcgtgtgcctgtaaggtacttacttgggaggctgaggcaggagaatcacttgaactcaggaggtggaggctgcagtgagctgagatcgcaccactgcactccagcctgggtgacggagcgagactccatctc

SEQ ID NO: 1298 - DNA, 2379 bp, Homo sapiens
agaagaagatcggtagattgagtggctagagaggtcggaggtaagtggctatagaagtcgggcggacccggaacccagaggacgcgacaccatgacttatgcttatctcttcaagtatatcatcatcggagacacaggtgtggggaagtcatgtctcctcctgcagtttacagataagcggttccagcctgtccacgacctcacaataggtgtggagtttggagctcgtatggtcaacattgatggaaaacaaatcaaactgcaaatctgggatacggctgggcaagaatccttccgttctatcacccgttcctactacaggggagcagctggagcactgctggtgtacgacattacaaggcgtgaaaccttcaaccacctgacctcatggttagaggatgcccggcagcactctagttccaacatggttatcatgctcattgggaataagagtgacctagagtcccgcagggatgtgaagagagaagaaggagaggcctttgctagggagcatggacttatattcatggaaacttcagccaaaacagcctgcaatgttgaagaggccttcattaacacagccaaagaaatatataggaagatccagcagggtttatttgatgtccacaatgaggcaaatggcatcaagattgggccccaacagtcaatttcaacatcagtgggacccagtgcctcccagcggaactctcgtgacatagggtccaactctggctgctgctgaacatctggcttgaactttttttgtccttcctggaatagcttcagatcaataggcttaatgaaagaggtctttcttgctttggctgagagcagcctctttttaaagtgtgatgttttgcctttccacctaaagaccaggagagaatttgggcccttactgacctgtcctccttcagggacatgagcattccctatagattagggttcttcttatcctcctatacaaatttcttaaattgttaggatcaaagttgattatcacagtagttaaaaaataatttcatggcggggcgccatggctcatgcctgtaatcccaaagtgctggattacaggtgtgagccaccgtgcctggcctaaataaataatttcgtaagcatatacaatccacttcccactaagaattagggtcaaagacattctatttgaacacttgcaattacctagatctagttggcctttggttgatagatcctctgcctcggaatttcattgagtttttttcttccttgcctttgggtgtctgcttgccacttcctaagaattcttgtagaaggcagtttcctctacttgcccaagagcactgagtacttctctactatcctattattagcttctatctcttagtgtaacttcaaaacttttaagagcagtgaagttggtcagggacatgtggccacttattattacctaaagaaaacatttgttccctgttcattttattttaggggccagatctaacattgtagtgtctttcaccagatagacttctactgtttcatcaaactcccttcttaactagacctagactttctactccaatcaggctaatctacttactgaatgtgacatatttattcctagttccatacctttgcacatgccctactctccactaattatacttaaaagtccaaaaattttttctttagtaacagacttaggtactgctaagcagttattaacacaatattccttagttttcatatgttggttattcatatgtctatttatatgtatatttatttttatgtatgttactatgtaaatatggtttgcagttgtttttgtgtggaatcttgtctttccgtataagttgtaagctccttgagagcaggatccatgtcattcctttatttttataaattattccccctatcattcctttacagtgcctagtgctactcattatgtgttcattgaatttgactgacatagttaaaaacttaaggtttattttagactttcaaggaaacaaaagactttagagtcctctctctgtaattctgccccactcatttgtttaccctgggttttatacagttctcttccttctcccctcccacctttccctggctttttgcctccattccatgaggcatacagtaaggctgcctgctagtaagcagtcacataagtgggtacctatccagccattctcttttcagagcatataatactatcttagccaaacttgcctttgcttcactcatcatgcagccttctgggttggttgctatatatatcttttttccttgatgtcccattctcttccacagccctgaggtcttacgaatttttctactttctttttgctgttgatgaattgtttcattattaaatatatgcatgtatcaaag

SEQ ID NO: 1299 - DNA, 2335 bp, Homo sapiens
gaagaagatcggtagattgagtggctagagaggtcggaggtaagtggctatagaagtcgggcggacccggaacccagaggacgcgacaccatgacttatgcttatctcttcaagtatatcatcatcggagacacaggtgtggggaagtcatgtctcctcctgcagtttacagataagcggttccagcctgtccacgacctcacaataggtgtggagtttggagctcgtatggtcaacattgatggaaaacaaatcaaactgcaaatctgggatacggctgggcaagaatccttccgttctatcacccgttcctactacaggggagcagctggagcactgctggtgtacgacattacaaggcgtgaaaccttcaaccacctgacctcatggttagaggatgcccggcagcactctagttccaacatggttatcatgctcattgggaataagagtgacctagagtcccgcagggatgtgaagagagaagaaggagaggcctttgctagggagcatggacttatattcatggaaacttcagccaaaacagcctgcaatgttgaagaggccttcattaacacagccaaagaaatatataggaagatccagcagggtttatttgatgtccacaatgaggcaaatggcatcaagattgggccccaacagtcaatttcaacatcagtgggacccagtgcctcccagcggaactctcgtgacatagggtccaactctggctgctgctgaacatctggcttgaactttttttgtccttcctggaatagcttcagatcaataggcttaatgaaagaggtctttcttgctttggctgagagcagcctctttttaaagtgtgatgttttgcctttccacctaaagaccaggagagaatttgggcccttactgacctgtcctccttcagggacatgagcattccctatagattagggttcttcttatcctcctatacaaatttcttaaattgttaggaccaaagtgctggattacaggcgtgagccaccgtgcctggcctaaataaataatttcgtaagcatatacaatccacttcccactaagaattagggtcaaagacattctgcttgaacacttgcagttacctagatctagttggcctttggttgatagatcctctgcctcagaatttcattgagtttttttcttccttgcctttgggtgtctgcttgccacttcctaagaattcttgtagaaggcagtttcctctacttgcccaagagcactgagtacttctctactatcctattattagcttctatctcttagtgtaacttcaaaacttttaagagcagtgaagttggtcagggacatgtggccacttattattacctaaagaaaacatttgttccctgttcattttattttaggggccagatctaacattgtagtgtctttcaccagatagacttctactgtttcatcaaactcccttcttaactagacctagactttctactccaatcaggctaatctacttactgaatgtgacatatttattcctagttccatacctttgcacatgccctactctccactaattatacttaaaagtccaaaaattttttctttagtaacagacttaggtactgctaagcagttattaacacaatattccttagttttcatatgttggttattcatatgtctatttatatgtatatttatttttatgtatgttactatgtaaatatggtttgcagttgtttttgtgtggaatcttgtctttccgtataagttgtaagctccttgagagcaggatccatgtcattcctttatttttataaattattccccctatcattcctttacagtgcctagtgctgctcattatgtgttcattgaatttgactgacatagttaaaaacttaaggtttattttagactttcaaggaaacaaaagactttagagtcctctctctgtaattctgccccactcatttgtttaccctgggttttatacatttctcttccttctcccctcccacctttccctggctttttgcctccattccatgaggcatacagtaaggctgcctgctagtaagcagtcacataagtgggtacctatccagccattctcttttcagagcatataatactatcttagccaaacttgcctttgcttcactcatcatgcagccttctgggttggttgctatatatatcttttttccttgatgtcccattctcttccacagccctgaggtcttacgaatttttctactttctttttgctgttgatgaattgtttcattattaaatatatgcatgtaccaaaaaaaaaaaaaaaaaaaaaaaaaaaaaa

SEQ ID NO: 1300 - DNA, 2785 bp, Homo sapiens
ggaaggacgcaacgctgccaccatggacagtagcacctggagccccaagaccaccgcggtcacccggcctgttgagacccacgagctcattcgcaatgcagccgatatctccatcatcgttatctacttcgtggtagtgatggccgtcggactgtgggctatgttttccaccaatcgtgggactgttggaggcttcttcctggcaggccgaagtatggtgtggtggccgattggagcctccctctttgctagtaacattggaagtggccactttgtggggctggccgggactggggcagcttcaggcatcgccattggaggctttgaatggaatgccctggttttggtggttgtgctgggctggctgtttgtccccatctatattaaggctggggtggtgacaatgccagagtacctgaggaagcggtttggaggccagcggatccaggtctacctttcccttctgtccctgctgctctacattttcaccaagatctcggcagacatcttctcgggggccatattcatcaatctggccttaggcctgaatctgtatttagccatctttctcttattggcaatcactgccctttacacaattacagggggcctggcggcggtgatttacacggacaccttgcagacggtgatcatgctggtggggtctttaatcctgactgggtttgcttttcacgaagtgggaggctatgacgccttcatggaaaagtacatgaaagccattccaaccatagtgtctgatggcaacaccacctttcaggaaaaatgctacactccaagggccgactccttccacatcttccgagatcccctcacgggagacctcccatggcctgggttcatctttgggatgtccatccttaccttgtggtactggtgcacagatcaggtcattgtgcagcgctgcctctcagccaagaatatgtctcacgtgaagggtggctgcatcctgtgtgggtatctaaagctgatgcccatgttcatcatggtgatgccaggaatgatcagccgcattctgtacacagaaaaaattgcctgtgtcgtcccttcagaatgtgagaaatattgcggtaccaaggttggctgtaccaacatcgcctatccaaccttagtggtggagctcatgcccaatggactgcgaggcctgatgctatcagtcatgctggcctccctcatgagctccctgacctccatcttcaacagcgccagcaccctcttcaccatggacatctacgccaaggtccgcaagagagcatctgagaaagagctcatgattgccggaaggttgtttatcctggtgctgattggcatcagcatcgcctgggtgcccattgtgcagtcagcacaaagtgggcaactcttcgattacatccagtccatcaccagttacttgggaccacccattgcggctgtcttcctgcttgctattttctggaagagagtcaatgagccaggagccttttggggactgatcctaggacttctgattgggatttcacgtatgattactgagtttgcttatggaaccgggagctgcatggagcccagcaactgtcccacgattatctgtggggtgcactacttgtactttgccattatcctcttcgccatttctttcatcaccatcgtggtcatctccctcctcaccaaacccattccggatgtgcatctctaccgtctgtgttggagcctgcgcaacagcaaagaggagcgtattgacctggatgcggaagaggagaacatccaagaaggccctaaggagaccattgaaatagaaacacaagttcctgagaagaaaaaaggaatcttcaggagagcctatgacctattttgtgggctagagcagcacggtgcacccaagatgactgaggaagaggagaaagccatgaagatgaagatgacggacacctctgagaagcctttgtggaggacagtgttgaacgtcaatggcatcatcctggtgaccgtggctgtcttttgccatgcatattttgcctgagtcctaccttttgctgtagatttaccatggctggactcttactcaccttcctttagtctcgtcctgtggtgttgaagggaaatcagccagttgtaaattttgcccaggtggataaatgtgtacatgtgtaattataggctagctggaagaaaaccattagtttgctgttaatttatgcatttgaagccagtgtgatacagccatctgtacctactggagctgcagaagggaagtccactcagtcacatccagaaaaaggcagactaagaatcagaagccatgtgattgatgtctgacgtgagtctgtctcaggtagattccgggtgtcagtgtggtttataatccttgaatattgttttagaaactttggtctccctggttcctgccacttttcctgtccgtcctcctccccattttttttttaaaagaaagctgttttcccctcatcatatccctcttgagttttgcctggactttccctctcaagtgtgtcaatcaggtaaactgaggaatgcatggaagctgaggatggagcttgatgggctccctgtcctgggtgtttgctctctgaagtggaggcctgaggaaggtagtacttccacaaaagggagggacccgggccccagcctcaagctagtgggggaggcagatagcctgaatccaggggattttctgggcttcttaaaatgtccattgtgagttccccgtgtttgggattccactcattttggcattcacagtgcctggaatgtcttagattttcagcaa

SEQ ID NO: 1301 - DNA, 2449 bp, Homo sapiens
cgctgccaccatggacagtagcacctggagccccaagaccaccgcggtcacccggcctgttgagacccacgagctcattcgcaatgcagccgatatctccatcatcgttatctacttcgtggtagtgatggccgtcggactgtgggctatgttttccaccaatcgtgggactgttggaggcttcttcctggcaggccgaagtatggtgtggtggccgattggagcctccctctttgctagtaacattggaagtggccactttgtggggctggccgggactggggcagcttcaggcatcgccattggaggctttgaatggaatgccctggttttggtggttgtgctgggctggctgtttgtccccatctatattaaggctggggtggtgacaatgccagagtacctgaggaagcggtttggaggccagcggatccaggtctacctttcccttctgtccctgctgctctacattttcaccaagatctcggcagacatcttctcgggggccatattcatcaatctggccttaggcctgaatctgtatttagccatctttctcttattggcaatcactgccctttacacaattacagggggcctggcggcggtgatttacacggacaccttgcagacggtgatcatgctggtggggtctttaatcctgactgggtttgcttttcacgaagtgggaggctatgacgccttcatggaaaagtacatgaaagccattccaaccatagtgtctgatggcaacaccacctttcaggaaaaatgctacactccaagggccgactccttccacatcttccgagatcccctcacgggagacctcccatggcctgggttcatctttgggatgtccatccttaccttgtggtactggtgcacagatcaggtcattgtgcagcgctgcctctcagccaagaatatgtctcacgtgaagggtggctgcatcctgtgtgggtatctaaagctgatgcccatgttcatcatggtgatgccaggaatgatcagccgcattctgtacacagaaaaaattgcctgtgtcgtcccttcagaatgtgagaaatattgcggtaccaaggttggctgtaccaacatcgcctatccaaccttagtggtggagctcatgcccaatggactgcgaggcctgatgctatcagtcatgctggcctccctcatgagctccctgacctccatcttcaacagcgccagcaccctcttcaccatggacatctacgccaaggtccgcaagagagcatctgagaaagagctcatgattgccggaaggttgtttatcctggtgctgattggcatcagcatcgcctgggtgcccattgtgcagtcagcacaaagtgggcaactcttcgattacatccagtccatcaccagttacttgggaccacccattgcggctgtcttcctgcttgctattttctggaagagagtcaatgagccaggagccttttggggactgatcctaggacttctgattgggatttcacgtatgattactgagtttgcttatggaaccgggagctgcatggagcccagcaactgtcccacgattatctgtggggtgcactacttgtactttgccattatcctcttcgccatttctttcatcaccatcgtggtcatctccctcctcaccaaacccattccggatgtgcatctctaccgtctgtgttggagcctgcgcaacagcaaagaggagcgtattgacctggatgcggaagaggagaacatccaagaaggccctaaggagaccattgaaatagaaacacaagttcctgagaagaaaaaaggaatcttcaggagagcctatgacctattttgtgggctagagcagcacggtgcacccaagatgactgaggaagaggagaaagccatgaagatgaagatgacggacacctctgagaagcctttgtggaggacagtgttgaacgtcaatggcatcatcctggtgaccgtggctgtcttttgccatgcatattttgcctgagtcctaccttttgctgtagatttaccatggctggactcttactcaccttcctttagtctcgtcctgtggtgttgaagggaaatcagccagttgtaaattttgcccaggtggataaatgtgtacatgtgtaattataggctagctggaagaaaaccattagtttgctgttaatttatgcatttgaagccagtgtgatacagccatctgtacctactggagccgcagaagggagtccactcagtcacatccagaaaaaggcagactaagaatcagaagccatgtgattgatgtctgacgtgagtctgtctcaggtagattccgggtgtcagtgtggtttataatccttgaatattgttttagaaactttggtctccctggttcctgccacttttcctgtccgtcctcctccccattttttttttaaaagaaagctgttttcccctc

SEQ ID NO: 1302 - DNA, 2387 bp, Homo sapiens
gctgctgcgacagtccactacctttttcgagagtgactcccgttgtcccaaggcttcccagagcgaacctgtgcggctgcaggcaccggcgcgtcgagtttccggcgtccggaaggaccgagctcttctcgcggatccagtgttccgtttccagcccccaatctcagagccgagccgacagagagcagggaaccggcatggccaaagccgcggcgatcggcatcgacctgggcaccacctactcctgcgtgggggtgttccaacacggcaaggtggagatcatcgccaacgaccagggcaaccgcaccacccccagctacgtggccttcacggacaccgagcggctcatcggggatgcggccaagaaccaggtggcgctgaacccgcagaacaccgtgtttgacgcgaagcggctgatcggccgcaagttcggcgacccggtggtgcagtcggacatgaagcactggcctttccaggtgatcaacgacggagacaagcccaaggtgcaggtgagctacaagggggagaccaaggcattctaccccgaggagatctcgtccatggtgctgaccaagatgaaggagatcgccgaggcgtacctgggctacccggtgaccaacgcggtgatcaccgtgccggcctacttcaacgactcgcagcgccaggccaccaaggatgcgggtgtgatcgcggggctcaacgtgctgcggatcatcaacgagcccacggccgccgccatcgcctacggcctggacagaacgggcaagggggagcgcaacgtgctcatctttgacctgggcgggggcaccttcgacgtgtccatcctgacgatcgacgacggcatcttcgaggtgaaggccacggccggggacacccacctgggtggggaggactttgacaacaggctggtgaaccacttcgtggaggagttcaagagaaaacacaagaaggacatcagccagaacaagcgagccgtgaggcggctgcgcaccgcctgcgagagggccaagaggaccctgtcgtccagcacccaggccagcctggagatcgactccctgtttgagggcatcgacttctacacgtccatcaccagggcgaggttcgaggagctgtgctccgacctgttccgaagcaccctggagcccgtggagaaggctctgcgcgacgccaagctggacaaggcccagattcacgacctggtcctggtcgggggctccacccgcatccccaaggtgcagaagctgctgcaggacttcttcaacgggcgcgacctgaacaagagcatcaaccccgacgaggctgtggcctacggggcggcggtgcaggcggccatcctgatgggggacaagtccgagaacgtgcaggacctgctgctgctggacgtggctcccctgtcgctggggctggagacggccggaggcgtgatgactgccctgatcaagcgcaactccaccatccccaccaagcagacgcagatcttcaccacctactccgacaaccaacccggggtgctgatccaggtgtacgagggcgagagggccatgacgaaagacaacaatctgttggggcgcttcgagctgagcggcatccctccggcccccaggggcgtgccccagatcgaggtgaccttcgacatcgatgccaacggcatcctgaacgtcacggccacggacaagagcaccggcaaggccaacaagatcaccatcaccaacgacaagggccgcctgagcaaggaggagatcgagcgcatggtgcaggaggcggagaagtacaaagcggaggacgaggtgcagcgcgagagggtgtcagccaagaacgccctggagtcctacgccttcaacatgaagagcgccgtggaggatgaggggctcaagggcaagatcagcgaggccgacaagaagaaggtgctggacaagtgtcaagaggtcatctcgtggctggacgccaacaccttggccgagaaggacgagtttgagcacaagaggaaggagctggagcaggtgtgtaaccccatcatcagcggactgtaccagggtgccggtggtcccgggcctgggggcttcggggctcagggtcccaagggagggtctgggtcaggccccaccattgaggaggtagattaggggcctttccaagattgctgtttttgttttggagcttcaagactttgcatttcctagtatttctgtttgtcagttctcaatttcctgtgtttgcaatgttgaaattttttggtgaagtactgaacttgctttttttccggtttctacatgcagagatgaatttatactgccatcttacgactatttcttctttttaatacacttaactcaggccattttttaagttggttacttcaaagtaaataaactttaaaattcaagtga

SEQ ID NO: 1303 - DNA, 2664 bp, Homo sapiens
agagccagcccggaggagctagaaccttccccgcatttctttcagcagcctgagtcagaggcgggctggcctggcgtagccgcccagcctcgcggctcatgccccgatctgcccgaaccttctcccggggtcagcgccgcgccgcgccacccggctgagtcagcccgggcgggcgagaggctctcaactgggcgggaaggtgcgggaaggtgcggaaaggttcgcgaaagttcgcggcggcgggggtcgggtgaggcgcaaaaggataaaaagcccgtggaagcggagctgagcagatccgagccgggctggctgcagagaaaccgcagggagagcctcactgctgagcgcccctcgacggcggagcggcagcagcctccgtggcctccagcatccgacaagaagcttcagccatgcaggccccacgggagctcgcggtgggcatcgacctgggcaccacctactcgtgcgtgggcgtgtttcagcagggccgcgtggagatcctggccaacgaccagggcaaccgcaccacgcccagctacgtggccttcaccgacaccgagcggctggtcggggacgcggccaagagccaggcggccctgaacccccacaacaccgtgttcgatgccaagcggctgatcgggcgcaagttcgcggacaccacggtgcagtcggacatgaagcactggcccttccgggtggtgagcgagggcggcaagcccaaggtgcgcgtatgctaccgcggggaggacaagacgttctaccccgaggagatctcgtccatggtgctgagcaagatgaaggagacggccgaggcgtacctgggccagcccgtgaagcacgcagtgatcaccgtgcccgcctatttcaatgactcgcagcgccaggccaccaaggacgcgggggccatcgcggggctcaacgtgttgcggatcatcaatgagcccacggcagctgccatcgcctatgggctggaccggcggggcgcgggagagcgcaacgtgctcatttttgacctgggtgggggcaccttcgatgtgtcggttctctccattgacgctggtgtctttgaggtgaaagccactgctggagatacccacctgggaggagaggacttcgacaaccggctcgtgaaccacttcatggaagaattccggcggaagcatgggaaggacctgagcgggaacaagcgtgccctgcgcaggctgcgcacagcctgtgagcgcgccaagcgcaccctgtcctccagcacccaggccaccctggagatagactccctgttcgagggcgtggacttctacacgtccatcactcgtgcccgctttgaggaactgtgctcagacctcttccgcagcaccctggagccggtggagaaggccctgcgggatgccaagctggacaaggcccagattcatgacgtcgtcctggtggggggctccactcgcatccccaaggtgcagaagttgctgcaggacttcttcaacggcaaggagctgaacaagagcatcaaccctgatgaggctgtggcctatggggctgctgtgcaggcggccgtgttgatgggggacaaatgtgagaaagtgcaggatctcctgctgctggatgtggctcccctgtctctggggctggagacagcaggtggggtgatgaccacgctgatccagaggaacgccactatccccaccaagcagacccagactttcaccacctactcggacaaccagcctggggtcttcatccaggtgtatgagggtgagagggccatgaccaaggacaacaacctgctggggcgttttgaactcagtggcatccctcctgccccacgtggagtcccccagatagaggtgacctttgacattgatgctaatggcatcctgagcgtgacagccactgacaggagcacaggtaaggctaacaagatcaccatcaccaatgacaagggccggctgagcaaggaggaggtggagaggatggttcatgaagccgagcagtacaaggctgaggatgaggcccagagggacagagtggctgccaaaaactcgctggaggcccatgtcttccatgtgaaaggttctttgcaagaggaaagccttagggacaagattcccgaagaggacaggcgcaaaatgcaagacaagtgtcgggaagtccttgcctggctggagcacaaccagctggcagagaaggaggagtatgagcatcagaagagggagctggagcaaatctgtcgccccatcttctccaggctctatggggggcctggtgtccctgggggcagcagttgtggcactcaagcccgccagggggaccccagcaccggccccatcattgaggaggttgattgaatggcccttcgtgataagtcagctgtgactgtcagggctatgctatgggccttctagactgtcttctatgatcctgcccttcagagatgaactttccctccaaagctagaactttcttcccaggataactgaagtcttttgactttttggggggagggcggttcatcctcttctgcttcaaataaaaagtcattaatttattaaaacttgtgtggcactttaacattgctttcacctatattttgtgtactttgttacttgcatgtatgaattttgttatgtaaaatatagttatagacctaaataaaaaaaaaaaaaa

SEQ ID NO: 1304 - DNA, 2523 bp, Homo sapiens
cagcctgaggagctgctgcgagggtccgcttcgtctttcgagagtgactcccgcggtcccaaggctttccagagcgaacctgtgcggctgcaggcaccggcgtgttgagtttccggcgttccgaaggactgagctcttgtcgcggatcccgtccgccgtttccagcccccagtctcagagcggagcccacagagcagggcaccggcatggccaaagccgcggcgatcggcatcgacctgggcaccacctactcctgcgtgggggtgttccaacacggcaaggtggagatcatcgccaacgaccagggcaaccgcaccacccccagctacgtggccttcacggacaccgagcggctcatcggggatgcggccaagaaccaggtggcgctgaacccgcagaacaccgtgtttgacgcgaagcggctgatcggccgcaagttcggcgacccggtggtgcagtcggacatgaagcactggcctttccaggtgatcaacgacggagacaagcccaaggtgcaggtgagctacaagggggagaccaaggcattctaccccgaggagatctcgtccatggtgctgaccaagatgaaggagatcgccgaggcgtacctgggctacccggtgaccaacgcggtgatcaccgtgccggcctacttcaacgactcgcagcgccaggccaccaaggatgcgggtgtgatcgcggggctcaacgtgctgcggatcatcaacgagcccacggccgccgccatcgcctacggcctggacagaacgggcaagggggagcgcaacgtgctcatctttgacctgggcgggggcaccttcgacgtgtccatcctgacgatcgacgacggcatcttcgaggtgaaggccacggccggggacacccacctgggtggggaggactttgacaacaggctggtgaaccacttcgtggaggagttcaagagaaaacacaagaaggacatcagccagaacaagcgagccgtgaggcggctgcgcaccgcctgcgagagggccaagaggaccctgtcgtccagcacccaggccagcctggagatcgactccctgtttgagggcatcgacttctacacgtccatcaccagggcgaggttcgaggagctgtgctccgacctgttccgaagcaccctggagcccgtggagaaggctctgcgcgacgccaagctggacaaggcccagattcacgacctggtcctggtcgggggctccacccgcatccccaaggtgcagaagctgctgcaggacttcttcaacgggcgcgacctgaacaagagcatcaaccccgacgaggctgtggcctacggggcggcggtgcaggcggccatcctgatgggggacaagtccgagaacgtgcaggacctgctgctgctggacgtggctcccctgtcgctggggctggagacggccggaggcgtgatgactgccctgatcaagcgcaactccaccatccccaccaagcagacgcagatcttcaccacctactccgacaaccaacccggggtgctgatccaggtgtacgagggcgagagggccatgacgaaagacaacaatctgttggggcgcttcgagctgagcggcatccctccggcccccaggggcgtgccccagatcgaggtgaccttcgacatcgatgccaacggcatcctgaacgtcacggccacggacaagagcaccggcaaggccaacaagatcaccatcaccaacgacaagggccgcctgagcaaggaggagatcgagcgcatggtgcaggaggcggagaagtacaaagcggaggacgaggtgcagcgcgagagggtgtcagccaagaacgccctggagtcctacgccttcaacatgaagagcgccgtggaggatgaggggctcaagggcaagatcagcgaggcggacaagaagaaggttctggacaagtgtcaagaggtcatctcgtggctggacgccaacaccttggccgagaaggacgagtttgagcacaagaggaaggagctggagcaggtgtgtaaccccatcatcagcggactgtaccagggtgccggtggtcccgggcctggcggcttcggggctcagggtcccaagggagggtctgggtcaggccctaccattgaggaggtggattaggggcctttgttctttagtatgtttgtctttgaggtggactgttgggactcaaggactttgctgctgttttcctatgtcatttctgcttcagctctttgctgcttcacttctttgtaaagttgtaacctgatggtaattagctggcttcattatttttgtagtacaaccgatatgttcattagaattctttgcatttaatgttgatactgtaagggtgtttcgttccctttaaatgaatcaacactgccaccttctgtacgagtttgtttgtttttttttttttttttttttttgcttggcgaaaacactacaaaggctgggaatgtatgtttttataatttgtttatttaaatatgaaaaataaaatgttaaactttttcttgtctgttaa

SEQ ID NO: 1305 - DNA, 2279 bp, Homo sapiens
cgggctggctgcagagaaaccgcagggagagcctcactgctgagcgcccctcgacggcggagcggcagcagcctccgtggcctccagcatccgacaagaagcttcagccatgcaggccccacgggagctcgcggtgggcatcgacctgggcaccacctactcgtgcgtgggcgtgtttcagcagggccgcgtggagatcctggccaacgaccagggcaaccgcaccacgcccagctacgtggccttcaccgacaccgagcggctggtcggggacgcggccaagagccaggcggccctgaacccccacaacaccgtgttcgatgccaagcggctgatcgggcgcaagttcgcggacaccacggtgcagtcggacatgaagcactggcccttccgggtggtgagcgagggcggcaagcccaaggtgcgcgtatgctaccgcggggaggacaagacgttctaccccgaggagatctcgtccatggtgctgagcaagatgaaggagacggccgaggcgtacctgggccagcccgtgaagcacgcagtgatcaccgtgcccgcctatttcaatgactcgcagcgccaggccaccaaggacgcgggggccatcgcggggctcaacgtgttgcggatcatcaatgagcccacggcagctgccatcgcctatgggctggaccggcggggcgcgggagagcgcaacgtgctcatttttgacctgggtgggggcaccttcgatgtgtcggttctctccattgacgctggtgtctttgaggtgaaagccactgctggagatacccacctgggaggagaggacttcgacaaccggctcgtgaaccacttcatggaagaattccggcggaagcatgggaaggacctgagcgggaacaagcgtgccctgcgcaggctgcgcacagcctgtgagcgcgccaagcgcaccctgtcctccagcacccaggccaccctggagatagactccctgttcgagggcgtggacttctacacgtccatcactcgtgcccgctttgaggaactgtgctcagacctcttccgcagcaccctggagccggtggagaaggccctgcgggatgccaagctggacaaggcccagattcatgacgtcgtcctggtggggggctccactcgcatccccaaggtgcagaagttgctgcaggacttcttcaacggcaaggagctgaacaagagcatcaaccctgatgaggctgtggcctatggggctgctgtgcaggcggccgtgttgatgggggacaaatgtgagaaagtgcaggatctcctgctgctggatgtggctcccctgtctctggggctggagacagcaggtggggtgatgaccacgctgatccagaggaacgccactatccccaccaagcagacccagactttcaccacctactcggacaaccagcctggggtcttcatccaggtgtatgagggtgagagggccatgaccaaggacaacaacctgctggggcgttttgaactcagtggcatccctcctgccccacgtggagtcccccagatagaggtgacctttgacattgatgctaatggcatcctgagcgtgacagccactgacaggagcacaggtaaggctaacaagatcaccatcaccaatgacaagggccggctgagcaaggaggaggtggagaggatggttcatgaagccgagcagtacaaggctgaggatgaggcccagagggacagagtggctgccaaaaactcgctggaggcccatgtcttccatgtgaaaggttctttgcaagaggaaagccttagggacaagattcccgaagaggacaggcgcaaaatgcaagacaagtgtcgggaagtccttgcctggctggagcacaaccagctggcagagaaggaggagtatgagcatcagaagagggagctggagcaaatctgtcgccccatcttctccaggctctatggggggcctggtgtccctgggggcagcagttgtggcactcaagcccgccagggggaccccagcaccggccccatcattgaggaggttgattgaatggcccttcgtgataagtcagctgtgactgtcagggctatgctatgggccttctagactgtcttctatgatcctgcccttcagagatgaactttccctccaaagctagaactttcttcccaggataactgaagtcttttgactttttggggggagggcggttcatcctcttctgcttcaaataaaaagtcattaatttaaaaaaaaaaaaaaaaaaaaaaaaaaaaaaaaaaaaaaa

SEQ ID NO: 1306 - DNA, 2512 bp, Homo sapiens
gcctgaggagctgctgcgagggtccgcttcgtctttcgagagtgactcccgcggtcccaaggctttccagagcgaacctgtgcggctgcaggcaccggcgtgttgagtttccggcgttccgaaggactgagctcttgtcgcggatcccgtccgccgtttccagcccccagtctcagagcggagcccacagagcagggcaccggcatggccaaagccgcggcgatcggcatcgacctgggcaccacctactcctgcgtgggggtgttccaacacggcaaggtggagatcatcgccaacgaccagggcaaccgcaccacccccagctacgtggccttcacggacaccgagcggctcatcggggatgcggccaagaaccaggtggcgctgaacccgcagaacaccgtgtttgacgcgaagcggctgatcggccgcaagttcggcgacccggtggtgcagtcggacatgaagcactggcctttccaggtgatcaacgacggagacaagcccaaggtgcaggtgagctacaagggggagaccaaggcattctaccccgaggagatctcgtccatggtgctgaccaagatgaaggagatcgccgaggcgtacctgggctacccggtgaccaacgcggtgatcaccgtgccggcctacttcaacgactcgcagcgccaggccaccaaggatgcgggtgtgatcgcggggctcaacgtgctgcggatcatcaacgagcccacggccgccgccatcgcctacggcctggacagaacgggcaagggggagcgcaacgtgctcatctttgacctgggcgggggcaccttcgacgtgtccatcctgacgatcgacgacggcatcttcgaggtgaaggccacggccggggacacccacctgggtggggaggactttgacaacaggctggtgaaccacttcgtggaggagttcaagagaaaacacaagaaggacatcagccagaacaagcgagccgtgaggcggctgcgcaccgcctgcgagagggccaagaggaccctgtcgtccagcacccaggccagcctggagatcgactccctgtttgagggcatcgacttctacacgtccatcaccagggcgaggttcgaggagctgtgctccgacctgttccgaagcaccctggagcccgtggagaaggctctgcgcgacgccaagctggacaaggcccagattcacgacctggtcctggtcgggggctccacccgcatccccaaggtgcagaagctgctgcaggacttcttcaacgggcgcgacctgaacaagagcatcaaccccgacgaggctgtggcctacggggcggcggtgcaggcggccatcctgatgggggacaagtccgagaacgtgcaggacctgctgctgctggacgtggctcccctgtcgctggggctggagacggccggaggcgtgatgactgccctgatcaagcgcaactccaccatccccaccaagcagacgcagatcttcaccacctactccgacaaccaacccggggtgctgatccaggtgtacgagggcgagagggccatgacgaaagacaacaatctgttggggcgcttcgagctgagcggcatccctccggcccccaggggcgtgccccagatcgaggtgaccttcgacatcgatgccaacggcatcctgaacgtcacggccacggacaagagcaccggcaaggccagcaagatcaccatcaccaacgacaagggccgcctgagcaaggaggagatcgagcgcatggtgcaggaggcggagaagtacaaagcggaggacgaggtgcagcgcgagagggtgtcagccaagaacgccctggagtcctacgccttcaacatgaagagcgccgtggaggatgaggggctcaagggcaagatcagcgaggcggacaagaagaaggttctggacaagtgtcaagaggtcatctcgtggctggacgccaacaccttggccgagaaggacgagtttgagcacaagaggaaggagctggagcaggtgtgtaaccccatcatcagcggactgtaccagggtgccggtggtcccgggcctgggggcttcggggctcagggtcccaagggagggtctgggtcaggccctaccattgaggaggtggattaggggcctttgttctttagtatgtttgtctttgaggtggactgttgggactcaaggactttgctgctgttttcctatgtcatttctgcttcagctctttgctgcttcacttctttgtaaagttaagttgtaacctgatggtaattagctggcttcattatttttgtagtacaaccgatatgttcattagaattctttgcatttaatgttgatactgtaagggtgtttcgttccctttaaatgaatcaacactgccaccttctgtacgagtttgtttttttttttttttttttttttttttgcttggcgaaaacactacaaaggctgggaatgtatgtttttataatttgtttatttaaatatgaaaaataaaatgttaaacttt

SEQ ID NO: 1307 - DNA, 2379 bp, Homo sapiens
cctttttcgagagtgactcccgttgtcccaaggcttcccagagcgaacctgtgcggctgcaggcaccggcgcgtcgagtttccggcgtccggaaggaccgagctcttctcgcggatccagtgttccgtttccagcccccaatctcagagcggagccgacagagagcagggaaccggcatggccaaagccgcggcgatcggcatcgacctgggcaccacctactcctgcgtgggggtgttccaacacggcaaggtggagatcatcgccaacgaccagggcaaccgcaccacccccagctacgtggccttcacggacaccgagcggctcatcggggatgcggccaagaaccaggtggcgctgaacccgcagaacaccgtgtttgacgcgaagcggctgatcggccgcaagttcggcgacccggtggtgcagtcggacatgaagcactggcctttccaggtgatcaacgacggagacaagcccaaggtgcaggtgagctacaagggggagaccaaggcattctaccccgaggagatctcgtccatggtgctgaccaagatgaaggagatcgccgaggcgtacctgggctacccggtgaccaacgcggtgatcaccgtgccggcctacttcaacgactcgcagcgccaggccaccaaggatgcgggtgtgatcgcggggctcaacgtgctgcggatcatcaacgagcccacggccgccgccatcgcctacggcctggacagaacgggcaagggggagcgcaacgtgctcatctttgacctgggcgggggcaccttcgacgtgtccatcctgacgatcgacgacggcatcttcgaggtgaaggccacggccggggacacccacctgggtggggaggactttgacaacaggctggtgaaccacttcgtggaggagttcaagagaaaacacaagaaggacatcagccagaacaagcgagccgtgaggcggctgcgcaccgcctgcgagagggccaagaggaccctgtcgtccagcacccaggccagcctggagatcgactccctgtttgagggcatcgacttctacacgtccatcaccagggcgaggttcgaggagctgtgctccgacctgttccgaagcaccctggagcccgtggagaaggctctgcgcgacgccaagctggacaaggcccagattcacgacctggtcctggtcgggggctccacccgcatccccaaggtgcagaagctgctgcaggacttcttcaacgggcgcgacctgaacaagagcatcaaccccgacgaggctgtggcctacggggcggcggtgcaggcggccatcctgatgggggacaagtccgagaacgtgcaggacctgctgctgctggacgtggctcccctgtcgctggggctggagacggccggaggcgtgatgactgccctgatcaagcgcaactccaccatccccaccaagcagacgcagatcttcaccacctactccgacaaccaacccggggtgctgatccaggtgtacgagggcgagagggccatgacgaaagacaacaatctgttggggcgcttcgagctgagcggcatccctccggcccccaggggcgtgccccagatcgaggtgaccttcgacatcgatgccaacggcatcctgaacgtcacggccacggacaagagcaccggcaaggccaacaagatcaccatcaccaacgacaagggccgcctgagcaaggaggagatcgagcgcatggtgcaggaggcggagaagtacaaagcggaggacgaggtgcagcgcgagagggtgtcagccaagaacgccctggagtcctacgccttcaacatgaagagcgccgtggaggatgaggggctcaagggcaagatcagcgaggcggacaagaagaaggttctggacaagtgtcaagaggtcatctcgtggctggacgccaacaccttggccgagaaggacgagtttgagcacaagaggaaggagctggagcaggtgtgtaaccccatcatcagcggactgtaccagggtgccggtggtcccgggcctgggggcttcggggctcagggtcccaagggagggtctgggtcaggccccaccattgaggaggtggattaggggcctttccaagattgctgtttttgttttggagcttcaagactttgcatttcctagtatttctgtttgtcagttctcaatttcctgtgtttgcaatgttgaaattttttggtgaagtactgaacttgctttttttccggtttctacatgcagagatgaatttatactgccatcttacgactatttcttctttttaatacacttaactcaggccattttttaagttggttacttcaaagtaaataaactttaaaattcaaaaaaaaaaaaaaaaaa

SEQ ID NO: 1308 - DNA, 1278 bp, Homo sapiens
agatccgagccgggctggcggcagagaaaccgcagggagagcctcactgctgagcgcccctcgacggcggagcggcagcagcctccgtggcctccagcatccgacaagaagcttcagccatgcaggccccacgggagctcgcggtgggcatcgacctgggcaccacctactcgtgcgtgggcgtgtttcagcagggccgcgtggagatcctggccaacgaccagggcaaccgcaccacgcccagctacgtggccttcaccgacaccgagcggctggtcggggacgcggccaagagccaggcggccctgaacccccacaacaccgtgttcgatgccaagcggctgatcgggcgcaagttcgcggacaccacggtgcagtcggacatgaagcactggcccttccaggtggtgagcgagggcggcaagcccaaggtgcgcgtatgctaccgcggggaggacaagacgttctaccccgaggagatctcgtccatggtgctgagcaagatgaaggagacggccgaggcgtacctgggccagcccgtgaagcacgcagtgatcaccgtgcccacctatttcagtaactcgcagcgccaggccaccaaggacgcgggggccatcgcggggctcaaggtgctgccgatcatcaatgaggccacggcagcagccatcgcctatgggctggaccggcggggcgcgggaaagcgcaacgtgctcatttttgacctgggtgggggcaccttcgatgtgtcggttctctccattgacgccggtgtctttgaggtgaaagccactgctggagatacccacctgggaggagaggacttcgacaaccggctcgtgaaccacttcatggaagaattccggcggaagcatgggaaggacctgagcgggaacaagcgtgccctgcgcaggctgcgcacagcctgtgagcgcgccaagcgcaccccgtcctccagcacccaggccaccctggagatagactccctgttcgagggcgtggacttctacaagtccatcactcgtgcccgctttgaggaactgtgctcagacctcttccgcagcaccctggagccggtggagaaggccctgcgggatgccaagctggacaaggcccagattcatgacttcgtcctggggggagggctccactcgcatccccaaggtgcagaagttgctgcaggacttcttcaacggcaaggagctgaacaagagcatcaaccctgatgaggctgtggcctatggggctgctgtgcaggcggccgtgttgagggggacaaat

SEQ ID NO: 1309 - DNA, 5404 bp, Homo sapiens
ggagcggtccgggaggcggacccggctcctgccagggttgggtgcgccgctgaacggatggctgagggagccccgcggatcgtttaggaaagccggccagctgatcgtcgtgtgttgccacccattcatgtcaagatgactaagtttggatttttgcgattgtcctatgagaagcaggacacacttttgaagcttctcattctgtcaatggctgctgtattatccttctccactcgtctgtttgctgtcctgagatttgaaagtgttatccatgagtttgatccgtactttaattatcggactaccaggttcctggctgaggaggggttttataaattccataactggtttgatgaccgagcctggtaccctttgggacgaatcattggaggaacaatttacccaggtttaatgatcacctctgctgcaatctaccatgtactccattttttccacatcaccatcgacattcggaatgtctgtgtgttcctggcccctctcttctcctccttcaccaccatcgtcacgtaccaccttaccaaagagctcaaggatgcaggggctgggcttcttgctgctgccatgattgctgtagttcctggatatatctcccgatctgtggctggctcctatgataatgaagggattgccatcttttgcatgctactcacctactacatgtggatcaaggcagtaaagactggttccatctgttgggcagctaagtgtgcccttgcttatttctacatggtctcgtcatggggaggttatgtgttcctgatcaacttaattcctctccacgtcctcgtgctgatgctcacaggccgtttctctcaccggatctatgtggcctactgtactgtttactgcctgggcactatactttctatgcagatctcctttgtgggtttccagcctgtcctttcatcagagcacatggcagcctttggggtctttggtctctgccagatccatgcctttgtggattacctgcgcagcaagttgaatccacaacaatttgaagttcttttccggagcgtcatctctctggtaggctttgtccttctcaccgtgggagctctcctcatgctgacaggaaaaatatctccctggacggggcgtttctactcgctgctggatccctcttatgctaagaacaacatccccatcattgcttctgtgtctgagcatcagcccacaacctggtcctcatactattttgacctgcagctcctcgtcttcatgtttccagttggcctctattactgctttagcaacctgtctgatgcccggatttttatcatcatgtatggtgtgaccagcatgtacttttcagctgtaatggtgcgtctaatgctagtgttggcacctgttatgtgcattctctctggcattggagtctcccaggtgctgtccacatacatgaagaatctggacataagtcgtccagacaagaagagcaagaagcaacaggattccacctaccctattaagaatgaagtggcaagtgggatgatactggtcatggctttctttctcatcacctacacctttcattcaacctgggtgaccagtgaggcctactcttctccgtccattgtactatctgcccgtggtggggatggcagtaggatcatatttgatgacttccgagaagcatattattggcttcgtcataatactccagaggatgcgaaggtcatgtcctggtgggattatggctatcagattacagctatggcaaaccgaacaattttagtggacaataacacatggaataatacccatatttctcgagtagggcaggcaatggcgtccacagaggaaaaagcctatgagatcatgagggagctcgatgtcagctatgtgctggtcatttttggaggcctcactgggtattcctctgatgatatcaacaagtttctttggatggtccggattggagggagcacagatacaggcaaacatatcaaggagaatgactattatactccaactggggagttccgtgtggaccgtgaaggttctccagtgctgctcaactgcctcatgtacaagatgtgttactatcgctttggacaggtttacacagaagccaagcgtcctccaggctttgaccgtgtccgaaatgctgagattgggaataaagactttgagcttgatgtcctggaggaagcatataccacagaacattggctggtcaggatatacaagacgctctttgactttataaatcagcagttttgaagactcaagacaaacagtgaaattattggtttatcaatggagaggaagaaactcttccagcattacatatagagcttgatgagatggggtctccctatgttccccaggctggtcctgaactcctggcctcaagccattctcctgcctcgccttcccaaagtgctggaattacaggcaggagccactgcgcccggccagtgctggagaatgtaatggagatgatcctgcctatccctgagttccagtctagtttactgtcagagaatacttatttccatttttcctattttgttcttgagtctctttcctcagaatttacttttccacttaaatgacgtacgcagcttttaaatttgcgttgtaagatttattttggctctccccgcctgttctttgcacattaaaaatgaaaaagtttgtagaactaagctaagcagatggtcttcctgcaaaaagaccgggctgaagtaaagcattgttttggagctggttcacagaaaaaaggcaaaactggttatcctgacttcaagctccaacataaactgctcgctttctccgggaaacttgccccgccacatacacttgactgcgtggccagttctttcgaagcctctcgctcccaacacggagttcctcccatttcttcacagtcggctctcagcagctgctgctggtttctcggctccagcaccacgagtaccgcactctgaggtttacaaagcactctgcttcaccgactgtgatcctcacagtcctgtccggtggcctcacgcaggtggcggtgcagcctttcaggcccagagcggccaggagcgaagcccgcagccccgcctggaagcgcagcgcggtcggtcgcgcgcccctgaggcttggaggcctgggcttcccccagcagcgctcgagcaccgcccagtcgagcctcacaccggatgccacttcatatttgggcccagagctcaattcgcgccgatgcggtccgccgtccttaaatctcttcagccaggatctctccccgactgcaaagcagccctgggcgggagcggcaacatctccacgtcacccttttggagccgccgacattcagaggggcaggacacgggaacgcgcgctgtcttgctttacggcgcgggtgcgcgagtttgcggcagcgtgacgccctcaagttttggcgggaaaagcgctgcatttggattcctgcagtggtgggcaaaggacagtccgccgaggtgctcggtggagtcatggcagtgccctttgtggaagactgggacttggtgcaaaccctgggagaaggtgcctatggagaagttcaacttgctgtgaatagagtaactgaagaagcagtcgcagtgaagattgtagatatgaagcgtgccgtagactgtccagaaaatattaagaaagagatctgtatcaataaaatgctaaatcatgaaaatgtagtaaaattctatggtcacaggagagaaggcaatatccaatatttatttctggagtactgtagtggaggagagctttttgacagaatagagccagacataggcatgcctgaaccagatgctcagagattcttccatcaactcatggcaggggtggtttatctgcatggtattggaataactcacagggatattaaaccagaaaatcttctgttggatgaaagggataacctcaaaatctcagactttggcttggcaacagtatttcggtataataatcgtgagcgtttgttgaacaagatgtgtggtactttaccatatgttgctccagaacttctgaagagaagagaatttcatgcagaaccagttgatgtttggtcctgtggaatagtacttactgcaatgctcgctggagaattgccatgggaccaacccagtgacagctgtcaggagtattctgactggaaagaaaaaaaaacatacctcaacccttggaaaaaaatcgattctgctcctctagctctgctgcataaaatcttagttgagaatccatcagcaagaattaccattccagacatcaaaaaagatagatggtacaacaaacccctcaagaaaggggcaaaaaggccccgagtcacttcaggtggtgtgtcagagtctcccagtggattttctaagcacattcaatccaatttggacttctctccagtaaacagtgcttctagtgaagaaaatgtgaagtactccagttctcagccagaaccccgcacaggtctttccttatgggataccagcccctcatacattgataaattggtacaagggatcagcttttcccagcccacatgtcctgatcatatgcttttgaatagtcagttacttggcaccccaggatcctcacagaacccctggcagcggttggtcaaaagaatgacacgattctttaccaaattggatgcagacaaatcttatcaatgcctgaaagagacttgtgagaagttgggctatcaatggaagaaaagttgtatgaatcaggttactatatcaacaactgataggagaaacaataaactcattttcaaagtgaatttgttagaaatggatgataaaatattggttgacttccggctttctaagggtgatggattggagttcaagagacacttcctgaagattaaagggaagctgattgatattgtgagcagccagaaggtttggcttcctgccacatgatcggaccatcggctctggggaatcctggttgaggccttggctcctgcctgtagtcccagctacttaggaggctgagagaggaggatcgcgtgaacctggaagtttgaggctgtagtgagctatgattgcaccagtgcactccagcttggatgacagaatggagtttcactcttgtctcccaggctggagtacaatggcatgatctcagcttactgcaacctccgtctcctgggttcaagcgattctcctgcctcagccttccaagtagctgggattacaggtgcccaccaccacacctggctaggttttgtatttttagtagagatggggttttttcatgttggccaggctgatctggaactcctgacctcaagtgatccacctgccttggcctcccaaagtgctgggattttaggtgtgagccacctcgcctggcaagggattctgttcttagtccttgaaaaaataaagttctgaatcttcaa

SEQ ID NO: 1310 - DNA, 2472 bp, Homo sapiens
ctgccagggttgggtgcgccgctgaacggatggctgagggagccccgcggatcgttaggaaagccggccagctgatcgtcgtgtgttgccacccattcatgtcaagatgactaagtttggatttttgcgattgtcctatgagaagcaggacacacttttgaagcttctcattctgtcaatggctgctgtattatccttctccactcgtctgtttgctgtcctgagatttgaaagtgttatccatgagtttgatccgtactttaattatcggactaccaggttcctggctgaggaggggttttataaattccataactggtttgatgaccgagcctggtaccctttgggacgaatcattggaggaacaatttacccaggtttaatgatcacctctgctgcaatctaccatgtactccattttttccacatcaccatcgacattcggaatgtctgtgtgttcctggcccctctcttctcctccttcacctccatcgtcacgtacctccttaccaaagagctcaaggatgcaggggctgggcttcttgctgctgccatgattgctgtagttcctggatatatctcccgatctgtggctggctcctatgataatgaagggattgccatcttttgcatgctactcacctactacatgtggatcaaggcagtaaagactggttccatctgttgggcagctaagtgtgcccttgcttatttctacatggtctcgtcatggggaggttatgtgttcctgatcaacttaattcctctccacgtcctcgtgctgatgctcacaggccgtttctctcaccggatctatgtggcctactgtactgtttactgcctgggtactatactttctaggcagatctcctttgtgggtttccagcctgtcctttcatcagagcacatggcagggtttggggtctttggtctctgccagatccatgcctttgtggattacctgcgcagcaagttgaatccacaacaatttgaagttcttttccggagcgtcatctctctggtaggctttgtccttctcaccgtgggagctctcctcatgctgacaggaaaaatatctccctggacggggcgtttctactcactgctggatccctcttatgctaagaacaacatccccatcattgcttctgtgtctgagcatcagcccacaacctggtcctcatactattttgacctgcagctcctcgtcttcatgtttccagttggcctctattactgctttagcaacctgtctgatgcccggatttttatcatcatgtatggtgtgaccagcatgtacttttcagctgtaatggtgcgtctaatgctagtgttggcacctgttatgagcattctctctggcattggagtctcccaggtgctgtccacatacatgaagaatctggacataagtcgcccagacaagaagagcaagaagcaacaggattccacctaccctattaagattgaagtggcaagtgggatgatactggtcatggctttctttctcatcacctacacctttcattcaacctgggtgaccagtgaggcctactcttctccgtccattgtactatctgcccgtggtggggatggcagtaggatcatatttgatgacttccgagaagcatattattggcttcgtcataatactccagaggatgcgaaggtcatgtcctggtgggattatggctatcagattacagctatggcaaaccgaacaattttagtggacaataacacatggaataatacccatatttctcgagtagggcaggcaatggcgtccacagaggaaaaagcctatgagatcatgagggagctcgatgtcagctatgtgctggtcatttttggaggcctcactgggtattcctctgatgatatcaacaagtttctttggatggtccggattggagggagcacagatacaggcaaacatatcaaggagaatgactattatactccaactggggagttccgtgtggaccgtgaaggttctccagtgctgctcaactgcctcatgtacaagatgtgttactatcgctttggacaggtttacacagaagccaagcgtcctccaggctttgaccgtgtccgaaatgctgagattgggaataaagactttgagcttgatgtcctggaggaaggctataccacagaacattggctggtcaggatatacaaggtaaaggacctggataatcgaggcttgtcaaggacataaatgtcacgtccagctctgatatcttcgcactgagcacatcacatttaggacgttgaagattttttttttttttttttttttaatatgcagtttgtaagaacaaaactggatggcatccgaattgtctggaagttttgtcttgggcatgatgggctgggccaaatgaaatgatttttataattctaaacaggttaccaaatgaaatgtcatggctttactttggtcaattaaaggggggaattttttta

SEQ ID NO: 1311 - DNA, 3046 bp, Homo sapiens
ggagcggtccgggaggcggacccggctcctgccagggttgggtgcgccgctgaacggatggctgagggagccccgcggatcgtttaggaaagccggccagctgatcgtcgtgtgttgccacccattcatgtcaagatgactaagtttggatttttgcgattgtcctatgagaagcaggacacacttttgaagcttctcattctgtcaatggctgctgtattatccttctccactcgtctgtttgctgtcctgagatttgaaagtgttatccatgagtttgatccgtactttaattatcggactaccaggttcctggctgaggaggggttttataaattccataactggtttgatgaccgagcctggtaccctttgggacgaatcattggaggaacaatttacccaggtttaatgatcacctctgctgcaatctaccatgtactccattttttccacatcaccatcgacattcggaatgtctgtgtgttcctggcccctctcttctcctccttcaccaccatcgtcacgtaccaccttaccaaagagctcaaggatgcaggggctgggcttcttgctgctgccatgattgctgtagttcctggatatatctcccgatctgtggctggctcctatgataatgaagggattgccatcttttgcatgctactcacctactacatgtggatcaaggcagtaaagactggttccatctgttgggcagctaagtgtgcccttgcttatttctacatggtctcgtcatggggaggttatgtgttcctgatcaacttaattcctctccacgtcctcgtgctgatgctcacaggccgtttctctcaccggatctatgtggcctactgtactgtttactgcctgggcactatactttctatgcagatctcctttgtgggtttccagcctgtcctttcatcagagcacatggcagcctttggggtctttggtctctgccagatccatgcctttgtggattacctgcgcagcaagttgaatccacaacaatttgaagttcttttccggagcgtcatctctctggtaggctttgtccttctcaccgtgggagctctcctcatgctgacaggaaaaatatctccctggacggggcgtttctactcgctgctggatccctcttatgctaagaacaacatccccatcattgcttctgtgtctgagcatcagcccacaacctggtcctcatactattttgacctgcagctcctcgtcttcatgtttccagttggcctctattactgctttagcaacctgtctgatgcccggatttttatcatcatgtatggtgtgaccagcatgtacttttcagctgtaatggtgcgtctaatgctagtgttggcacctgttatgtgcattctctctggcattggagtctcccaggtgctgtccacatacatgaagaatctggacataagtcgtccagacaagaagagcaagaagcaacaggattccacctaccctattaagaatgaagtggcaagtgggatgatactggtcatggctttctttctcatcacctacacctttcattcaacctgggtgaccagtgaggcctactcttctccgtccattgtactatctgcccgtggtggggatggcagtaggatcatatttgatgacttccgagaagcatattattggcttcgtcataatactccagaggatgcgaaggtcatgtcctggtgggattatggctatcagattacagctatggcaaaccgaacaattttagtggacaataacacatggaataatacccatatttctcgagtagggcaggcaatggcgtccacagaggaaaaagcctatgagatcatgagggagctcgatgtcagctatgtgctggtcatttttggaggcctcactgggtattcctctgatgatatcaacaagtttctttggatggtccggattggagggagcacagatacaggcaaacatatcaaggagaatgactattatactccaactggggagttccgtgtggaccgtgaaggttctccagtgctgctcaactgcctcatgtacaagatgtgttactatcgctttggacaggtttacacagaagccaagcgtcctccaggctttgaccgtgtccgaaatgctgagattgggaataaagactttgagcttgatgtcctggaggaagcatataccacagaacattggctggtcaggatatacaaggtaaaggacctggataatcgaggcttgtcaaggacataaatgtcacgtccagctctgatatgcttcgcactgagcacatcacatttaggacgttgaagatttttttttttttttttttttaatatgcagtttgtaagaacaaaactggatggcatcagaattgtctggaagttttgtcttgggcagtatgggctgggccaaatgaaatgatttttataattctaaacaggttaccaaatgaaatgtcatggctttactttggtcaattaaaggggggaatttttttaaaaaatgtgccttatttgttttgacttataactgatttgagggaggcaaaagctatgctaggctgccagaaggacataagcagaccttgtccattctcttagctccctaaattagccaaatagagacttctttctcaaatcaggaaaactatcaaagaccaattcagatcctacatttacagacagttttgtcataaccctttgcattgcagcacctagtacaattccttggaaacagcgtggctcaataaatttttattgaatgaataaatgtgggaccagaagagtgctagaagagtgcctttctgggctactatgtctctgttctcaatgtcttttatccttagacgctctttgactttataaatcagcagttttgaagactcaagacaaacagtgaaattattggtttatcaatggagaggaagaaactcttccagcattacatatagagcttgatggtcagtaggtgtttttgaatcagcttaaatataatcatacatatcaatttgaaatggagcttttcagtactctcacttattcat

SEQ ID NO: 1312 - DNA, 5827 bp, Homo sapiens
ggagcggtccgggaggcggacccggctcctgccagggttgggtgcgccgctgaacggatggctgagggagccccgcggatcgtttaggaaagccggccagctgatcgtcgtgtgttgccacccattcatgtcaagatgactaagtttggatttttgcgattgtcctatgagaagcaggacacacttttgaagcttctcattctgtcaatggctgctgtattatccttctccactcgtctgtttgctgtcctgagatttgaaagtgttatccatgagtttgatccgtactttaattatcggactaccaggttcctggctgaggaggggttttataaattccataactggtttgatgaccgagcctggtaccctttgggacgaatcattggaggaacaatttacccaggtttaatgatcacctctgctgcaatctaccatgtactccattttttccacatcaccatcgacattcggaatgtctgtgtgttcctggcccctctcttctcctccttcaccaccatcgtcacgtaccaccttaccaaagagctcaaggatgcaggggctgggcttcttgctgctgccatgattgctgtagttcctggatatatctcccgatctgtggctggctcctatgataatgaagggattgccatcttttgcatgctactcacctactacatgtggatcaaggcagtaaagactggttccatctgttgggcagctaagtgtgcccttgcttatttctacatggtctcgtcatggggaggttatgtgttcctgatcaacttaattcctctccacgtcctcgtgctgatgctcacaggccgtttctctcaccggatctatgtggcctactgtactgtttactgcctgggcactatactttctatgcagatctcctttgtgggtttccagcctgtcctttcatcagagcacatggcagcctttggggtctttggtctctgccagatccatgcctttgtggattacctgcgcagcaagttgaatccacaacaatttgaagttcttttccggagcgtcatctctctggtaggctttgtccttctcaccgtgggagctctcctcatgctgacaggaaaaatatctccctggacggggcgtttctactcgctgctggatccctcttatgctaagaacaacatccccatcattgcttctgtgtctgagcatcagcccacaacctggtcctcatactattttgacctgcagctcctcgtcttcatgtttccagttggcctctattactgctttagcaacctgtctgatgcccggatttttatcatcatgtatggtgtgaccagcatgtacttttcagctgtaatggtgcgtctaatgctagtgttggcacctgttatgtgcattctctctggcattggagtctcccaggtgctgtccacatacatgaagaatctggacataagtcgtccagacaagaagagcaagaagcaacaggattccacctaccctattaagaatgaagtggcaagtgggatgatactggtcatggctttctttctcatcacctacacctttcattcaacctgggtgaccagtgaggcctactcttctccgtccattgtactatctgcccgtggtggggatggcagtaggatcatatttgatgacttccgagaagcatattattggcttcgtcataatactccagaggatgcgaaggtcatgtcctggtgggattatggctatcagattacagctatggcaaaccgaacaattttagtggacaataacacatggaataatacccatatttctcgagtagggcaggcaatggcgtccacagaggaaaaagcctatgagatcatgagggagctcgatgtcagctatgtgctggtcatttttggaggcctcactgggtattcctctgatgatatcaacaagtttctttggatggtccggattggagggagcacagatacaggcaaacatatcaaggagaatgactattatactccaactggggagttccgtgtggaccgtgaaggttctccagtgctgctcaactgcctcatgtacaagatgtgttactatcgctttggacaggtttacacagaagccaagcgtcctccaggctttgaccgtgtccgaaatgctgagattgggaataaagactttgagcttgatgtcctggaggaagcatataccacagaacattggctggtcaggatatacaagacgctctttgactttataaatcagcagttttgaagactcaagacaaacagtgaaattattggtttatcaatggagaggaagaaactcttccagcattacatatagagcttgatgagatggggtctccctatgttccccaggctggtcctgaactcctggcctcaagccattctcctgcctcgccttcccaaagtgctggaattacaggcaggagccactgcgcccggccagtgctggagaatgtaatggagatgatcctgcctatccctgagttccagtctagtttactgtcagagaatacttatttccatttttcctattttgttcttgagtctctttcctcagaatttacttttccacttaaatgacgtacgcagcttttaaatttgcgttgtaagatttattttggctctccccgcctgttctttgcacattaaaaatgaaaaagtttgtagaactaagctaagcagatggtcttcctgcaaaaagaccgggctgaagtaaagcattgttttggagctggttcacagaaaaaaggcaaaactggttatcctgacttcaagctccaacataaactgctcgctttctccgggaaacttgccccgccacatacacttgactgcgtggccagttctttcgaagcctctcgctcccaacacggagttcctcccatttcttcacagtcggctctcagcagctgctgctggtttctcggctccagcaccacgagtaccgcactctgaggtttacaaagcactctgcttcaccgactgtgatcctcacagtcctgtccggtggcctcacgcaggtggcggtgcagcctttcaggcccagagcggccaggagcgaagcccgcagccccgcctggaagcgcagcgcggtcggtcgcgcgcccctgaggcttggaggcctgggcttcccccagcagcgctcgagcaccgcccagtcgagcctcacaccggatgccacttcatatttgggcccagagctcaattcgcgccgatgcggtccgccgtccttaaatctcttcagccaggatctctccccgactgcaaagcagccctgggcgggagcggcaacatctccacgtcacccttttggagccgccgacattcagaggggcaggacacgggaacgcgcgctgtcttgctttacggcgcgggtgcgcgagtttgcggcagcgtgacgccctcaagttttggcgggaaaagcgctgcatttggattcctgcagtggtgggcaaaggacagtccgccgaggtgctcggtggagtcatggcagtgccctttgtggaagactgggacttggtgcaaaccctgggagaaggtgcctatggagaagttcaacttgctgtgaatagagtaactgaagaagcagtcgcagtgaagattgtagatatgaagcgtgccgtagactgtccagaaaatattaagaaagagatctgtatcaataaaatgctaaatcatgaaaatgtagtaaaattctatggtcacaggagagaaggcaatatccaatatttatttctggagtactgtagtggaggagagctttttgacagaatagagccagacataggcatgcctgaaccagatgctcagagattcttccatcaactcatggcaggggtggtttatctgcatggtattggaataactcacagggatattaaaccagaaaatcttctgttggatgaaagggataacctcaaaatctcagactttggcttggcaacagtatttcggtataataatcgtgagcgtttgttgaacaagatgtgtggtactttaccatatgttgctccagaacttctgaagagaagagaatttcatgcagaaccagttgatgtttggtcctgtggaatagtacttactgcaatgctcgctggagaattgccatgggaccaacccagtgacagctgtcaggagtattctgactggaaagaaaaaaaaacatacctcaacccttggaaaaaaatcgattctgctcctctagctctgctgcataaaatcttagttgagaatccatcagcaagaattaccattccagacatcaaaaaagatagatggtacaacaaacccctcaagaaaggggcaaaaaggccccgagtcacttcaggtggtgtgtcagagtctcccagtggattttctaagcacattcaatccaatttggacttctctccagtaaacagtgcttctagtgaagaaaatgtgaagtactccagttctcagccagaaccccgcacaggtctttccttatgggataccagcccctcatacattgataaattggtacaagggatcagcttttcccagcccacatgtcctgatcatatgcttttgaatagtcagttacttggcaccccaggatcctcacagaacccctggcagcggttggtcaaaagaatgacacgattctttaccaaattggatgcagacaaatcttatcaatgcctgaaagagacttgtgagaagttgggctatcaatggaagaaaagttgtatgaatcaggttactatatcaacaactgataggagaaacaataaactcattttcaaagtgaatttgttagaaatggatgataaaatattggttgacttccggctttctaagggtgatggattggagttcaagagacacttcctgaagattaaagggaagctgattgatattgtgagcagccagaaggtttggcttcctgccacatgatcggaccatcggctctggggaatcctggtgaatatagtgctgctatgttgacattattcttcctagagaagattatcctgtcctgcaaactgcaaatagtagttcctgaagtgttcacttccctgtttatccaaacatcttccaatttattttgtttgttcggcatacaaataatacctatatcttaattgtaagcaaaactttggggaaaggatgaatagaattcatttgattatttcttcatgtgtgtttagtatctgaatttgaaactcatctggtggaaaccaagtttcaggggacatgagttttccagcttttatacacacgtatctcatttttatcaaaacattttgtttaattcaaaaagtacatattccatgttgatttaattctaagatgaaccaataaagacataattcttgtgacttttggacagtagatttatcagtctgtgaagcgaagccagcttcaaaacatatccccaagatttgtacttatattttcaaaagggcctggccagttatataaacctgtttttgaattataatgattaattaaaattgcaagtaggtgttttttccagtgtagttagtaaaatacttgtattttacagtgttgcataaactctagtgcttaactaactttactctaaaaattactgttgaacatcttaaatatttttctatattttctactttcatagccatattttaaccttttcaacttactggtgaccaagcttttaggtgataaagaataaaagagggaagggaagagtaaggaagctataagaaaaatagatctgattctttgttcctttacctgttagacttacaaaaagtttgtttttctaataaaatttgtatcaactttggggcatattaggttgaggccttggctcctgcctg

SEQ ID NO: 1313 - DNA, 1305 bp, Homo sapiens
accagggcacttccggcggcgctctccgcgccttatcgccaaagctgcggctctggacgcccagccgcggcgtatcccgatcacttccgggtagtgctccacgggcacgagccgcgattgggctaccgtagatggggtacttccggtgtgcaggtgctgggtccttcggcaggaggaggaagatggagcccagcaccgcggcccgggcttgggccctcttttggttgctgctgcccttgcttggcgcggtttgcgccagcggaccccgcaccttagtgctgctggacaacctcaacgtgcgggagactcattcgcttttcttccggagcctgaaggaccggggctttgagctcacattcaagaccgctgatgaccccagcctgtctctcataaagtatggggaattcctctatgacaatctcatcattttctccccttcggtagaagattttggaggcaacatcaacgtggagaccatcagtgcctttattgacggtggaggcagtgtgctggtagctgccagctccgacattggtgaccctcttcgagagctgggcagtgagtgcgggattgagtttgacgaggagaaaacggctgtcattgaccatcacaactatgacatctcagaccttggccagcatacgctcatcgtggctgacactgagaacctgctgaaggccccaaccatcgttgggaaatcatctctaaatcccatcccctctccgcacagcgtggagacggggcagggaggggggttattaggattggtggttttgttttgctttgtttaaagccgtgggaaaatggcacaactttacctctgtgggagatgcaacactgagagccaaggggtgggagttgggataatttttatataaaagaagtttttccactttgaattgctaaaagtggcatttttcctatgtgcagtcactcctctcatttctaaaatagggacgtggccaggcacggtggctcatgcctgtaatcccagcactttgggaggccgaggcaggcggctcacgaggtcaggagatcgagactatcctggctaacacggtaaaaccctgtctctactaaaagtacaaaaaattagctgggcgtggtggtgggcacctgtagtcccagctactcgggaggctgaggcaggagaaaggcatgaatccaagaggcagagcttgcagtgagctgagatcacgccattgcactccagcctgggcaacagtgttaagactctgtctcaaatataaataaataaataaataaataaataaataaataaaaataaagcgagatgttgccctc

SEQ ID NO: 1314 - DNA, 1668 bp, Homo sapiens
ccgcgccttatcgccaaagctgcggctctggacgcccagccgcggcgtatcccgatcacttccgggtagtgctccacgggcacgagccgcgattgggctaccgtagatggggtacttccggtgtgcaggtgctgggtccttcggcaggaggaggaagatggagcccagcaccgcggcccgggcttgggccctcttttggttgctgctgcccttgcttggcgcggtttgcgccagcggaccccgcaccttagtgctgctggacaacctcaacgtgcgggagactcattcgcttttcttccggagcctgaaggaccggggctttgagctcacattcaagaccgctgatgaccccagcctgtctctcataaagtatggggaattcctctatgacaatctcatcattttctccccttcggtagaagattttggaggcaacatcaacgtggagaccatcagtgcctttattgacggcggaggcagtgtgctggtagctgccagctccgacattggtgaccctcttcgagagctgggcagtgagtgcgggattgagtttgacgaggagaaaacggctgtcattgaccatcacaactatgacatctcagaccttggccagcatacgctcatcgtggctgacactgagaacctgctgaaggccccaaccatcgttgggaaatcatctctaaatcccatcctctttcgaggtgttgggatggtggccgatcctgataaccctttggtgctggacatcctgacgggctcttccacctcttactccttcttcccggacaagcctatcacccagtatccacatgcggtggggaagaacaccctcctcattgctgggctccaggccaggaacaatgcccgcgtcatcttcagcggctccctcgacttcttcagcgactccttcttcaactcagcagtgcagaaggcggcgcccggctcccagaggtattcccagacaggcaactatgaactagctgtggccctctcccgctgggtgttcaaggaggagggtgtcctccgtgtggggcctgtgtcccatcatcgggtgggcgagacagccccacccaatgcctacactgtcactgacctagtggagtatagcatcgtgatccagcagctctcaaatggcaaatgggtcccctttgatggcgatgacattcagctggagtttgtccgcattgatccttttgtgaggaccttcctgaagaagaaaggtggcaaatacagtgttcagttcaagttgcccgacgtgtatggtgtattccagtttaaagtggattacaaccggctaggctacacacacctgtactcttccactcaggtatccgtgcggccactccagcacacgcagtatgagcgcttcatcccctcggcctacccctactacgccagcgccttccccatgatgctggggctcttcatcttcagcatcgtcttcttgcacatgaaggagaaggagaagtccgactgaggggctagagccctctccgcacagcgtggagacggggcaaggaggggggttattaggattggtggttttgttttgctttgtttaaagccgtgggaaaatggcacaactttacctctgtgggagatgcaacactgagagccaaggggtgggagttgggataatttttatataaaagaagtttttccactttg

SEQ ID NO: 1315 - DNA, 3295 bp, Homo sapiens
accagggcacttccggcggcgctctccgcgccttatcgccaaagctgcggctctggacgcccagccgcggcgtatcccgatcacttccgggtagtgctccacgggcacgagccgcgattgggctaccgtagatggggtacttccggtgtgcaggtgctgggtccttcggcaggaggaggaagatggagcccagcaccgcggcccgggcttgggccctcttttggttgctgctgcccttgcttggcgcggtttgcgccagcggaccccgcaccttagtgctgctggacaacctcaacgtgcgggagactcattcgcttttcttccggagcctgaaggaccggggctttgagctcacattcaagaccgctgatgaccccagcctgtctctcataaagtatggggaattcctctatgacaatctcatcattttctccccttcggtagaagattttggaggcaacatcaacgtggagaccatcagtgcctttattgacggtggaggcagtgtgctggtagctgccagctccgacattggtgaccctcttcgagagctgggcagtgagtgcgggattgagtttgacgaggagaaaacggctgtcattgaccatcacaactatgacatctcagaccttggccagcatacgctcatcgtggctgacactgagaacctgctgaaggccccaaccatcgttgggaaatcatctctaaatcccatcctctttcgaggtgttgggatggtggccgatcctgataaccctttggtgctggacatcctgacgggctcttccacctcttactccttcttcccggacaagcctatcacccagtatccacatgcggtggggaagaacaccctcctcattgctgggctccaggccaggaacaatgcccgcgtcatcttcagcggctccctcgacttcttcagcgactccttcttcaactcagcagtgcagaaggcggcgcccggctcccagaggtattcccagacaggcaactatgaactagctgtggccctctcccgctgggtgttcaaggaggagggtgtcctccgtgtggggcctgtgtcccatcatcgggtgggcgagacagccccacccaatgcctacactgtcactgacctagtggagtatagcatcgtgatccagcagctctcaaatggcaaatgggtcccctttgatggcgatgacattcagctggagtttgtccgcattgatccttttgtgaggaccttcctgaagaagaaaggtggcaaatacagtgttcagttcaagttgcccgacgtgtatggtgtattccagtttaaagtggattacaaccggctaggctacacacacctgtactcttccactcaggtatccgtgcggccactccagcacacgcagtatgagcgcttcatcccctcggcctacccctactacgccagcgccttctccatgatgctggggctcttcatcttcagcatcgtcttcttgcacatgaaggagaaggagaagtccgactgaggggctagagccctctccgcacagcgtggagacggggcagggaggggggttattaggattggtggttttgttttgctttgtttaaagccgtgggaaaatggcacaactttacctctgtgggagatgcaacactgagagccaaggggtgggagttgggataatttttatataaaagaagtttttccactttgaattgctaaaagtggcatttttcctatgtgcagtcactcctctcatttctaaaatagggacgtggccaggcacggtggctcatgcctgtaatcccagcactttgggaggccgaggcaggcggctcacgaggtcaggagatcgagactatcctggtaacacggtaaaaccctgtctctactaaaagtacaaaaaattagctgggcgtggtggtgggcacctgtagtcccagctactcgggaggctgaggcaggagaaaggcatgaatccaggaggcagagcttgcagtgagctgagatcacgccattgcactccagcctgggcaacagtgttaagactctgtctcaaatataaataaataaataaataaataaaaataaagcgagatgttgccctcaaacttcacctggccccggtcctggtttgctaatggctgtgggtgggggttactgtgggtgatgactgactggatacaaaatcctaagtaagtggcttcatgaaattttgcctaggactggactgtctttcttttaactgtgaaatgatgatggttctccctaacgtctcctcaaaggatacaagaaagttgttgttgctagtagaccgaggggtgggaattactgaaatggaaaatctagatgacagtgctggggaagagaaaactagaacagctcagttgaagacaacctttactgcatgttgacgctgatttaggcaatagcttcctaaaaatcatgtataaagttagttagttagacatgaaatctcttccccaatgttgatacctgcccacaaaatattctcaccttcagagtataagaatcattcttaaagccaaatattcagttcaaggcacatacgtcatctgcagttgtaaatttgcatttaatatttcacaattcctgtaagagaggctagtcaggagggaaaccctcaagtttaaatccccacacttacttacttactgctcatccgtcactttcgctaagtgagattaataattcagtagctggtccagaacgcacagcttgggaacgcagaggcccaggcctcatgtaatttcccactcccgtaactgaacgtgctgacccatgttgatgtctgccttcatccaggtggcaaatcagacatgctacgctgcccccttcaaacgagttcctcgtgttaggggcaaaggtcacagccaaactctgccactgacagccagtgccttggcctggatcctctctgtggatgcaggcctacccctcctcagtccagcctcatctactagaccagcttggccattcacttttcagatgtctgtgagcacaggactgcagactgaactctcactcaagttcttccatttgccaagcccgaggccttttccggctaaccagccctctctgcgctgtcttgtctcctgactcccaccctcaccattcacagaccatcacgacacagaggatgccaagttcttttagtaattcaccagctccatgcagggacatcacagggctgccctccatgagcagaggaggagggctgcctggcagagcgtttcacactccaggttagccagaaagagcatcttcatttttgtttccacacaacacttctct

SEQ ID NO: 1316 - DNA, 2101 bp, Homo sapiens
accagggcacttccggcggcgctctccgcgccttatcgccaaagctgcggctctggacgcccagccgcggcgtatcccgatcacttccgggtagtgctccacgggcacgagccgcgattgggctaccgtagatggggtacttccggtgtgcaggtgctgggtccttcggcaggaggaggaagatggagcccagcaccgcggcccgggcttgggccctcttttggttgctgctgcccttgcttggcgcggtttgcgccagcggaccccgcaccttagtgctgctggacaacctcaacgtgcgggagactcattcgcttttcttccggagcctgaaggaccggggctttgagctcacattcaagaccgctgatgaccccagcctgtctctcataaagtatggggaattcctctatgacaatctcatcattttctccccttcggtagaagattttggaggcaacatcaacgtggagaccatcagtgcctttattgacggtggaggcagtgtgctggtagctgccagctccgacattggtgaccctcttcgagagctgggcagtgagtgcgggattgagtttgacgaggagaaaacggctgtcattgaccatcacaactatgacatctcagaccttggccagcatacgctcatcgtggctgacactgagaacctgctgaaggccccaaccatcgttgggaaatcatctctaaatcccatcctctttcgaggtgttgggatggtggccgatcctgataaccctttggtgctggacatcctgacgggctcttccacctcttactccttcttcccggacaagcctatcacccagtatccacatgcggtggggaagaacaccctcctcattgctgggctccaggccaggaacaatgcccgcgtcatcttcagcggctccctcgacttcttcagcgactccttcttcaactcagcagtgcagaaggcggcgcccggctcccagaggtattcccagacaggcaactatgaactagctgtggccctctcccgctgggtgttcaaggaggagggtgtcctccgtgtggggcctgtgtcccatcatcgggtgggcgagacagccccacccaatgcctacactgtcactgacctagtggagtatagcatcgtgatccagcagctctcaaatggcaaatgggtcccctttgatggcgatgacattcagctggagtttgtccgcattgatccttttgtgaggaccttcctgaagaagaaaggtggcaaatacagtgttcagttcaagttgcccgacgtgtatggtgtattccagtttaaagtggattacaaccggctaggctacacacacctgtactcttccactcaggtatccgtgcggccactccagcacacgcagtatgagcgcttcatcccctcggcctacccctactacgccagcgccttctccatgatgctggggctcttcatcttcagcatcgtcttcttgcacatgaaggagaaggagaagtccgactgaggggctagagccctctccgcacagcgtggagacggggcagggaggggggttattaggattggtggttttgttttgctttgtttaaagccgtgggaaaatggcacaactttacctctgtgggagatgcaacactgagagccaaggggtgggagttgggataatttttatataaaagaagtttttccactttgaattgctaaaagtggcatttttcctatgtgcagtcactcctctcatttctaaaatagggacgtggccaggcacggtggctcatgcctgtaatcccagcactttgggaggccgaggcaggcggctcacgaggtcaggagatcgagactatcctggctaacacggtaaaaccctgtctctactaaaagtacaaaaaattagctgggcgtggtggtgggcacctgtagtcccagctactcgggaggctgaggcaggagaaaggcatgaatccaagaggcagagcttgcagtgagctgagatcacgccattgcactccagcctgggcaacagtgttaagactctgtctcaaatataaataaataaataaataaataaataaataaataaaaataaagcgagatgttgccctc

SEQ ID NO: 1317 - DNA, 8541 bp, Homo sapiens
tcacaggtttccgagacactaaagcgttttgcagggaaggtgacaacagccagtgtaaaggaacggagagaaatcctcagtgaacttgggaagtgtgttgctggaaaagatcttccagagggagcagtgaaggggctctgcaaattgttctgcttgactctgcatcgatatagagatgcagcctcccgcagggccttgcaggcagccatccagcagttggctgaggcccagccagaagccactgctaagaaccttctacactctctgcagtcttctggtataggctccaaagcaggtgttcccagtaagagcagtggctctgccgccttgctggccttgacctggacctgcctcctggtgcgcattgtctttccatcgagagccaagcgacaaggagacatctggaacaaactggtggaagtgcagtgcctgctcttgctggaggtgctgggtggctcccacaagcacgccgtggatggtgctgtgaagaaactcacgaagctgtggaaagaggtgacaggactgcaggggctgaaccccgggctggtggaacagtacttgtcagccattctcagcctagagcccaaccagaactatgctggcatgctggggctgctggtgcagttctgcacgagtcacaaggagatggacgtgagcgccctactggacttttacatgaagaacatcctgatgagcaaagtcaagcctccgaagtacctgttggatagctgtgcccctctgctccgatacctgtcccactcagaatttaaggatctgatactgcccaccatacagaagtccttactgaggagtccagagaatgttattgaaactatttctagtctgctggcatcagtgacgcttgacctcagccagtatgccatggacatcgtgaaaggactggctggtcacctgaaatccaacagtccccgcctgatggatgaagctgtgctggcactgcggaacctggcacgccagtgcagtgactcttcggccatggaatccctgaccaagcacctatttgctatcctcggaggctcggaaggaaaactaactgttgtagcccagaagatgagcgtcctctcagggattgggagcgtcagtcatcacgtggtgtctggaccttccagtcaggtcctgaatgggatcgtggctgagctgttcatcccgttccttcagcaggaagttcatgaagggaccttggtacacgctgtctcagtcctggctctctggtgtaaccgattcactatggaagtgcccaagaagctcactgaatggttcaaaaaagctttcagccttaaaacctccacatctgcggtgaggcatgcctacctgcagtgcatgttggcctcttaccggggtgacacgctgttgcaggccctggacttactgcccttgctcatccagacagtggagaaggcagcctcccaaagcactcaggttcccaccatcactgaaggggttgccgcagccttgttgctcttaaagttgtcagtggctgactcacaggctgaggccaaactgagcagtttctggcagttgattgtggatgagaaaaagcaggttttcacttctgagaaattcctggtcatggcttcagaggatgccctgtgtactgtgttgcatctgacagagagacttttccttgaccacccgcatagactcactggcaacaaagttcagcagtaccaccgggctctggtggcggtgctcctgagccgcacctggcacgtccgcaggcaggctcagcagacagttcggaagctgctgtcctctcttgggggctttaagctggcgcacggactcttggaggagctgaagactgtcctcagttctcacaaggtgctgcccttagaggctttggtgactgatgctggagaggtgactgaggcaggcaaggcctacgtgcctccacgggtcctgcaggaggctctgtgtgtcatctccggtgtgccagggctcaagggtgatgtcaccgacactgaacaactggcccaggaaatgctgatcatctcccaccacccatccttaggtccgtggctgcggtggtcctccatgaatgccatgggctccctttccgtcctgtcgccggaccgggtcctcccacagctcatcagcaccatcactgcctccgtgcagaaccctgcactgcgcctggtgacgcgggaggagtttgccattatgcagacccctgctggggagctgtatgacaaatccatcattcagagtgcccagcaggacagcataaaaaaggccaacatgaagcgagagaacaaagcttattccttcaaagagcagatcatcgagctggagctgaaggaggagataaagaagaagaaaggcatcaaagaggaggtgcagctgaccagcaagcagaaggagatgctgcaggcccagctagacagggaggcgcaggtccggaggcggctgcaggagctggatggggagctggaggcggcgcttggactgctggacatcatcctggccaagaacccgtccggcctgacccagtacatccctgttttggtcgactcttttctgcccttgctgaagtctcccctggctgctcccaggatcaagaaccccttcttgtccttggctgcctgtgtcatgccctctaggctcaaggctttgggcactttggtgagccacgtgaccctgcgcctgctgaagccagagtgtgtcctggataagtcctggtgccaggaagagctgtcggtggctgtgaagagggcggtgatgctgctgcacacccacaccatcaccagcagggtgggcaagggggagccaggtgctgcgcccttgtccgcgccagccttctccttagtcttcccgtttctgaagatggtgctgacggagatgccccaccacagtgaggaggaggaggagtggatggcccagattcttcagatcctcactgtccaagcccagctgagggcctcccccaacaccccacccgggcgggtggacgagaatggcccggagttgctgcctcgcgtggccatgctgcgtcttctgacttgggtgatcgggacgggctcgcctcgcttacaggttctggcttcagacaccctgaccaccctgtgtgccagcagcagtggtgatgatggctgtgcctttgcagagcaggaggaggtggacgtgctgctctgtgccttgcagtccccgtgtgccagcgtgcgggaaaccgtgctccgggggctgatggaactccacatggtattgccagcacctgatactgatgagaagaatggcctgaaccttctgcggagactctgggtggtcaagtttgacaaggaggaggagatccggaagctggctgagaggctctggtcaatgatgggcctagacctgcagccagacctctgctccttgctgattgacgacgtgatctatcatgaggcggctgtaaggcaggcaggggccgaagccctctcccaagcagtggcacgttaccagcggcaggcggcggaggttatgggcaggctcatggagatttaccaggaaaagctctaccggccgcccccagtgctggatgctttgggacgagttatttcagaatctcctccagatcagtgggaagccaggtgtggcttggcgttggccctcaacaagctctcccagtatttggacagctctcaggtgaagccactctttcagttttttgtccctgatgccctcaatgaccgacacccagatgtccggaagtgcatgttggatgcagccctcgcaacgctcaacactcatgggaaggagaacgtcaactcgctgttgccagtattcgaggagttcctgaagaacgcgcccaatgatgccagctatgatgctgtgcgacagagtgtggtggtcctgatgggctctctggccaagcacctggacaagagtgaccccaaagtgaagcccattgttgccaagctcatcgctgccctctccaccccctcccagcaggtccaggagtccgtagccagctgcttgccacccctcgtgccagccatcaaggaggatgctggagggatgatccagaggcttatgcagcagctgctggagtcagacaagtacgcagagcgcaaaggggccgcctatggcctggcgggcctggtgaagggcctgggcatcctctcgctgaagcaacaggagatgatggcggcactgactgatgccatccaagataagaagaacttccgccggcgagagggagccctctttgccttcgagatgctctgcaccatgctggggaaactttttgagccgtatgtggttcacgtgctgccccatctgctcctgtgctttggggatggaaaccagtatgtgcgtgaggctgcagatgactgtgccaaggctgtgatgagcaacttgagtgctcacggggtgaagctggtgctcccctccttactggctgccctggaggaggaatcgtggcggaccaaagctgggtcagtggagcttcttggggcaatggcgtactgtgctcctaagcagctgtcatcctgtctacccaacattgtgcccaagcttacggaggtgctgaccgactcccatgtcaaagtccagaaggctggacagcaggcgctcaggcagatcggctccgttatcaggaacccggagatcctggccattgctccagtcctcctggatgccctgacggatccctccaggaagacccagaagtgcttgcagaccctgctggacaccaagtttgtccacttcattgatgccccatccctggccctcatcatgcccattgtccagagagccttccaggaccgttccacggacacgcggaagatggcagcccagattattggcaacatgtactccctgacagaccagaaggacttggctccgtacctgcccagcgtgacgcctggcctgaaagcatcgcttttggaccctgtgcctgaggtgcggaccgtatctgcaaaggcccttggggccatggtgaagggcatgggggagtcgtgctttgaggacttgctgccgtggctgatggagacactgacctatgagcagagctctgtggatcgctcaggcgctgcacaggggttggctgaggtcatggccggtttgggggtggagaagttggagaagttgatgccagaaatcgtggctacagccagcaaagtggacattgcaccccatgtccgagatggctacattatgatgtttaactacctgcccatcacctttggagacaagtttactccttatgtggggcccatcatcccctgtatcctcaaagctcttgctgatgagaatgagtttgtgcgtgacaccgccctgcgcgcgggccagcgggttatctccatgtacgctgagacagccatcgccctgctgctgccccagctagagcaaggcctctttgatgacctttggagaatcaggttcagctctgttcagctccttggggatctcctgtttcacatctcaggagtcactgggaagatgaccacagaaactgcctctgaggatgataactttggaactgcccagtccaacaaggcgatcatcactgccctgggggtagagcggcggaaccgggtgttggcagggctgtacatgggccgctcagacacccagctggtggtgcggcaggcgtccctgcatgtctggaagattgttgtctccaataccccccgcaccttgcgtgagatcctacccactctctttgggctcctgctgggtttcctggccagcacgtgtgcagataagagaacgattgcagcgagaacattgggagatcttgtgcggaagttaggggagaaaatcctccccgagatcatccccatccttgaggaaggcctgaggtctcagaagagcgatgagaggcagggtgtgtgcattggcctaagtgagatcatgaagtccaccagccgggatgccgtgctgtatttctctgaatccctcgtgcccacggcaaggaaggctttgtgtgacccactggaggaggtcagagaggcggcagccaagactttcgagcagctgcattccaccatcggccaccaggctctggaggacattctcccatttttactaaagcagctggatgacgaggaggtgtcagagtttgccttggatggtctgaagcaagtcatggctattaagagtcgtgtggtgctgccctaccttgtgcccaagctgacaacgccacctgtcaacacccgggtgctggctttcctttcgtcagtggctggtgatgccctcacccgtcatcttggcgtgatcctcccagcggtcatgctggccctgaaggaaaagcttgggaccccagatgagcagctggagatggccaattgtcaggctgtgatcctctccgtagaggatgacacagggcaccggatcatcatcgaggatctgctggaggccacccgcagccctgaggtgggcatgaggcaagctgctgccatcatcctcaacatctactgttcccgctcaaaggctgactacaccagccacctgcggagcctggtctcgggcctgatccgcctcttcaatgactccagccctgtggttctggaggagagctgggatgccctaaatgccatcactaagaagctggatgctggcaaccagttggcactcattgaagagctgcacaaggaaatccggctcatagggaacgagagcaaaggcgagcatgtgccaggattctgcctcccgaagaagggagtgacctccatccttccagtgttgcgggaaggagtcctgactggcagccctgagcagaaggaggaggcagccaaagccttaggcttggtaatccgcctgacctcggctgacgccctgaggccctccgtggtcagcatcactggccctctgatccgcatcctgggggacaggttcagctggaatgtgaaggcggctctgctcgagacactcagcctcttgttggctaaggttgggattgccctgaagcccttcctgccccagctgcagaccactttcaccaaagccctgcaggactccaaccggggggtgcgcctgaaggccgcagatgctctggggaagctcatttccatccacattaaggtggaccccctcttcacagagctgctcaatggcatccgcgccatggaggacccaggtgtcagggacaccatgctgcaggccctgaggtttgtgattcagggagcaggggccaaagtggatgccgtcatccggaaaaacatcgtctcactcctgctgagcatgctgggacacgatgaggacaacactcgcatctcctcagccgggtgcctaggggaactgtgtgcctttttgactgaagaggagcttagtgccgttctacagcagtgcttgctggcggacgtgtccggcattgactggatggttcggcacgggcggagcctggcactttccgtggctgtgaatgtggctcctggcagactttgtgccggcagatatagcagtgatgttcaggaaatgatcctgagcagtgccacggcggacaggatccccattgcggtgagcggggtccggggcatgggctttctcatgagacaccacatcgagacaggcggagggcagttgccggccaaactttccagcctgttcgttaagtgtctgcagaacccatccagcgacatcaggctggtggctgagaagatgatctggtgggcaaataaggacccactgcctcccctggacccccaggccatcaagcccatcctgaaggctcttcttgacaacaccaaggataagaacaccgtggtcagggcctacagcgaccaggcaattgtcaacctcctcaagatgcggcagggtgaagaggtgtttcagtccctctccaagatcctggatgtggccagtttggaggtgctgaacgaggttaaccgaaggtccctgaagaagctggccagccaggccgactccacggagcaggtggacgacaccatcctgacatgagaggcctgggccagcagcagcattgccgctccacatctttgctcaatgttttcatttttgaaaatacatttgttccaatggggagcttggaagatggcgttcccagaaagtattttaatatcaatagaccacagccaaagccttaaatcaaacccacacacaactgaaaattgcctcctccatctctcaccttttcctgtggagaagagaaggaaaagcacacgcatgcgcctcagcaaatggcagcccaggagctgtttgtccagtttagcatggctaggtctggaactataatagcagggtcagactgtgggttcctcttctcctgtgcttgagctctggtttgagagctggcgctaccaacctttttcctatatcccgagtggggcacagacggtggatctctgcccagtgtggtgtgtctggcttggcttttcaatattgtgaggtctgaatggatctgatccctgtcagatgaaaatgattcacagctctggcagttcccaagtctggggaggggtataggtttgaaaggctgtttgaaagaggaatgtttaataaaggctttgatttaatcttgatataaacagatttttaaaaatctccacccattaaacatgaagcttcctgcatcaggaa

SEQ ID NO: 1318 - DNA, 8325 bp, Homo sapiens
caggtttccgagacactaaagcgttttgcagggaaggtgacaacagccagtgtaaaggaacggagagaaatcctcagtgaacttgggaagtgtgttgctggaaaagatcttccagagggagcagtgaaggggctctgcaaattgttctgcttgactctgcatcgatatagagatgcagcctcccgcagggccttgcaggcagccatccagcagttggctgaggcccagccagaagccactgctaagaaccttctacactctctgcagtcttctggtataggctccaaagcaggtgttcccagtaagagcagtggctctgccgccttgctggccttgacctggacctgcctcctggtgcgcattgtctttccatcgagagccaagcgacaaggagacatctggaacaaactggtggaagtgcagtgcctgctcttgctggaggtgctgggtggctcccacaagcacgccgtggatggtgctgtgaagaaactcacgaagctgtggaaagaggtgacaggactgcaggggctgaaccccgggctggtggaacagtacttgtcagccattctcagcctagagcccaaccagaactatgctggcatgctggggctgctggtgcagttctgcacgagtcacaaggagatggacgtgagcgccctactggacttttacatgaagaacatcctgatgagcaaagtcaagcctccgaagtacctgttggatagctgtgcccctctgctccgatacctgtcccactcagaatttaaggatctgatactgcccaccatacagaagtccttactgaggagtccagagaatgttattgaaactatttctagtctgctggcatcagtgacgcttgacctcagccagtatgccatggacatcgtgaaaggactggctggtcacctgaaatccaacagtccccgcctgatggatgaagctgtgctggcactgcggaacctggcacgccagtgcagtgactcttcggccatggaatccctgaccaagcacctatttgctatcctcggaggctcggaaggaaaactaactgttgtagcccagaagatgagcgtcctctcagggattgggagcgtcagtcatcacgtggtgtctggaccttccagtcaggtcctgaatgggatcgtggctgagctgttcatcccgttccttcagcaggaagttcatgaagggaccttggtacacgctgtctcagtcctggctctctggtgtaaccgattcactatggaagtgcccaagaagctcactgaatggttcaaaaaagctttcagccttaaaacctccacatctgcggtgaggcatgcctacctgcagtgcatgttggcctcttaccggggtgacacgctgttgcaggccctggacttactgcccttgctcatccagacagtggagaaggcagcctcccaaagcactcaggttcccaccatcactgaaggggttgccgcagccttgttgctcttaaagttgtcagtggctgactcacaggctgaggccaaactgagcagtttctggcagttgattgtggatgagaaaaagcaggttttcacttctgagaaattcctggtcatggcttcagaggatgccctgtgtactgtgttgcatctgacagagagacttttccttgaccacccgcatagactcactggcaacaaagttcagcagtaccaccgggctctggtggcggtgctcctgagccgcacctggcacgtccgcaggcaggctcagcagacagttcggaagctgctgtcctctcttgggggctttaagctggcgcacggactcttggaggagctgaagactgtcctcagttctcacaaggtgctgcccttagaggctttggtgactgatgctggagaggtgactgaggcaggcaaggcctacgtgcctccacgggtcctgcaggaggctctgtgtgtcatctccggtgtgccagggctcaagggtgatgtcaccgacactgaacaactggcccaggaaatgctgatcatctcccaccacccatccttagttgccgtgcagtctggactttggccagcacttcttgccaggatgaagatcgatcctgaagcctttatcaccaggcacctggatcagatcattcccaggatgaccacacagagtcccctaaaccagtcctccatgaatgccatgggctccctttccgtcctgtcgccggaccgggtcctcccacagctcatcagcaccatcactgcctccgtgcagaaccctgcactgcgcctggtgacgcgggaggagtttgccattatgcagacccctgctggggagctgtatgacaaatccatcattcagagtgcccagcaggacagcataaaaaaggccaacatgaagcgagagaacaaagcttattccttcaaagagcagatcatcgagctggagctgaaggaggagataaagaagaagaaaggcatcaaagaggaggtgcagctgaccagcaagcagaaggagatgctgcaggcccagctagacagggaggcgcaggtccggaggcggctgcaggagctggatggggagctggaggcggcgcttggactgctggacatcatcctggccaagaacccgtccggcctgacccagtacatccctgttttggtcgactcttttctgcccttgctgaagtctcccctggctgctcccaggatcaagaaccccttcttgtccttggctgcctgtgtcatgccctctaggctcaaggctttgggcactttggtgagccacgtgaccctgcgcctgctgaagccagagtgtgtcctggataagtcctggtgccaggaagagctgtcggtggctgtgaagagggcggtgatgctgctgcacacccacaccatcaccagcagggtgggcaagggggagccaggtgctgcgcccttgtccgcgccagccttctccttagtcttcccgtttctgaagatggtgctgacggagatgccccaccacagtgaggaggaggaggagtggatggcccagattcttcagatcctcactgtccaagcccagctgagggcctcccccaacaccccacccgggcgggtggacgagaatggcccggagttgctgcctcgcgtggccatgctgcgtcttctgacttgggtgatcgggacgggctcgcctcgcttacaggttctggcttcagacaccctgaccaccctgtgtgccagcagcagtggtgatgatggctgtgcctttgcagagcaggaggaggtggacgtgctgctctgtgccttgcagtccccgtgtgccagcgtgcgggaaaccgtgctccgggggctgatggaactccacatggtattgccagcacctgatactgatgagaagaatggcctgaaccttctgcggagactctgggtggtcaagtttgacaaggaggaggagatccggaagctggctgagaggctctggtcaatgatgggcctagacctgcagccagacctctgctccttgctgattgacgacgtgatctatcatgaggcggctgtaaggcaggcaggggccgaagccctctcccaagcagtggcacgttaccagcggcaggcggcggaggttatgggcaggctcatggagatttaccaggaaaagctctaccggccgcccccagtgctggatgctttgggacgagttatttcagaatctcctccagatcagtgggaagccaggtgtggcttggcgttggccctcaacaagctctcccagtatttggacagctctcaggtgaagccactctttcagttttttgtccctgatgccctcaatgaccgacacccagatgtccggaagtgcatgttggatgcagccctcgcaacgctcaacactcatgggaaggagaacgtcaactcgctgttgccagtattcgaggagttcctgaagaacgcgcccaatgatgccagctatgatgctgtgcgacagagtgtggtggtcctgatgggctctctggccaagcacctggacaagagtgaccccaaagtgaagcccattgttgccaagctcatcgctgccctctccaccccctcccagcaggtccaggagtccgtagccagctgcttgccacccctcgtgccagccatcaaggaggatgctggagggatgatccagaggcttatgcagcagctgctggagtcagacaagtacgcagagcgcaaaggggccgcctatggcctggcgggcctggtgaagggcctgggcatcctctcgctgaagcaacaggagatgatggcggcactgactgatgccatccaagataagaagaacttccgccggcgagagggagccctctttgccttcgagatgctctgcaccatgctggggaaactttttgagccgtatgtggttcacgtgctgccccatctgctcctgtgctttggggatggaaaccagtatgtgcgtgaggctgcagatgactgtgccaaggctgtgatgagcaacttgagtgctcacggggtgaagctggtgctcccctccttactggctgccctggaggaggaatcgtggcggaccaaagctgggtcagtggagcttcttggggcaatggcgtactgtgctcctaagcagctgtcatcctgtctacccaacattgtgcccaagcttacggaggtgctgaccgactcccatgtcaaagtccagaaggctggacagcaggcgctcaggcagatcggctccgttatcaggaacccggagatcctggccattgctccagtcctcctggatgccctgacggatccctccaggaagacccagaagtgcttgcagaccctgctggacaccaagtttgtccacttcattgatgccccatccctggccctcatcatgcccattgtccagagagccttccaggaccgttccacggacacgcggaagatggcagcccagattattggcaacatgtactccctgacagaccagaaggacttggctccgtacctgcccagcgtgacgcctggcctgaaagcatcgcttttggaccctgtgcctgaggtgcggaccgtatctgcaaaggcccttggggccatggtgaagggcatgggggagtcgtgctttgaggacttgctgccgtggctgatggagacactgacctatgagcagagctctgtggatcgctcaggcgctgcacaggggttggctgaggtcatggccggtttgggggtggagaagttggagaagttgatgccagaaatcgtggctacagccagcaaagtggacattgcaccccatgtccgagatggctacattatgatgtttaactacctgcccatcacctttggagacaagtttactccttatgtggggcccatcatcccctgtatcctcaaagctcttgctgatgagaatgagtttgtgcgtgacaccgccctgcgcgcgggccagcgggttatctccatgtacgctgagacagccatcgccctgctgctgccccagctagagcaaggcctctttgatgacctttggagaatcaggttcagctctgttcagctccttggggatctcctgtttcacatctcaggagtcactgggaagatgaccacagaaactgcctctgaggatgataactttggaactgcccagtccaacaaggcgatcatcactgccctgggggtagagcggcggaaccgggtgttggcagggctgtacatgggccgctcagacacccagctggtggtgcggcaggcgtccctgcatgtctggaagattgttgtctccaataccccccgcaccttgcgtgagatcctacccactctctttgggctcctgctgggtttcctggccagcacgtgtgcagataagagaacgattgcagcgagaacattgggagatcttgtgcggaagttaggggagaaaatcctccccgagatcatccccatccttgaggaaggcctgaggtctcagaagagcgatgagaggcagggtgtgtgcattggcctaagtgagatcatgaagtccaccagccgggatgccgtgctgtatttctctgaatccctcgtgcccacggcaaggaaggctttgtgtgacccactggaggaggtcagagaggcggcagccaagactttcgagcagctgcattccaccatcggccaccaggctctggaggacattctcccatttttactaaagcagctggatgacgaggaggtgtcagagtttgccttggatggtctgaagcaagtcatggctattaagagtcgtgtggtgctgccctaccttgtgcccaagctgacaacgccacctgtcaacacccgggtgctggctttcctttcgtcagtggctggtgatgccctcacccgtcatcttggcgtgatcctcccagcggtcatgctggccctgaaggaaaagcttgggaccccagatgagcagctggagatggccaattgtcaggctgtgatcctctccgtagaggatgacacagggcaccggatcatcatcgaggatctgctggaggccacccgcagccctgaggtgggcatgaggcaagctgctgccatcatcctcaacatctactgttcccgctcaaaggctgactacaccagccacctgcggagcctggtctcgggcctgatccgcctcttcaatgactccagccctgtggttctggaggagagctgggatgccctaaatgccatcactaagaagctggatgctggcaaccagttggcactcattgaagagctgcacaaggaaatccggctcatagggaacgagagcaaaggcgagcatgtgccaggattctgcctcccgaagaagggagtgacctccatccttccagtgttgcgggaaggagtcctgactggcagccctgagcagaaggaggaggcagccaaagccttaggcttggtaatccgcctgacctcggctgacgccctgaggccctccgtggtcagcatcactggccctctgatccgcatcctgggggacaggttcagctggaatgtgaaggcggctctgctcgagacactcagcctcttgttggctaaggttgggattgccctgaagcccttcctgccccagctgcagaccactttcaccaaagccctgcaggactccaaccggggggtgcgcctgaaggccgcagatgctctggggaagctcatttccatccacattaaggtggaccccctcttcacagagctgctcaatggcatccgcgccatggaggacccaggtgtcagggacaccatgctgcaggccctgaggtttgtgattcagggagcaggggccaaagtggatgccgtcatccggaaaaacatcgtctcactcctgctgagcatgctgggacacgatgaggacaacactcgcatctcctcagccgggtgcctaggggaactgtgtgcctttttgactgaagaggagcttagtgccgttctacagcagtgcttgctggcggacgtgtccggcattgactggatggttcggcacgggcggagcctggcactttccgtggctgtgaatgtggctcctggcagactttgtgccggcagatatagcagtgatgttcaggaaatgatcctgagcagtgccacggcggacaggatccccattgcggtgagcggggtccggggcatgggctttctcatgagacaccacatcgagacaggcggagggcagttgccggccaaactttccagcctgttcgttaagtgtctgcagaacccatccagcgacatcaggctggtggctgagaagatgatctggtgggcaaataaggacccactgcctcccctggacccccaggccatcaagcccatcctgaaggctcttcttgacaacaccaaggataagaacaccgtggtcagggcctacagcgaccaggcaattgtcaacctcctcaagatgcggcagggtgaagaggtgtttcagtccctctccaagatcctggatgtggccagtttggaggtgctgaacgaggttaaccgaaggtccctgaagaagctggccagccaggccgactccacggagcaggtggacgacaccatcctgacatgagaggcctgggccagcagcagcattgccgctccacatctttgctcaatgttttcatttttgaaaatacatttgttccaatggggagcttggaagatggcgttcccagaaagtattttaatatcaatagaccacagccaaagccttaaatcaaacccacacacaactgaaaattgcctcctccatctctcaccttttcctgtggagaagagaaggaaaagcacacgcatgcgcctcagcaaatggcattcccaagtctggggaggggtataggtttgaaaggctgtttgaaagaggaatgtttaataaaggctttgattt

SEQ ID NO: 1319 - DNA, 8217 bp, Homo sapiens
caggtttccgagacactaaagcgttttgcagggaaggtgacaacagccagtgtaaaggaacggagagaaatcctcagtgaacttgggaagtgtgttgctggaaaagatcttccagagggagcagtgaaggggctctgcaaattgttctgcttgactctgcatcgatatagagatgcagcctcccgcagggccttgcaggcagccatccagcagttggctgaggcccagccagaagccactgctaagaaccttctacactctctgcagtcttctggtataggctccaaagcaggtgttcccagtaagagcagtggctctgccgccttgctggccttgacctggacctgcctcctggtgcgcattgtctttccatcgagagccaagcgacaaggagacatctggaacaaactggtggaagtgcagtgcctgctcttgctggaggtgctgggtggctcccacaagcacgccgtggatggtgctgtgaagaaactcacgaagctgtggaaagaggtgacaggactgcaggggctgaaccccgggctggtggaacagtacttgtcagccattctcagcctagagcccaaccagaactatgctggcatgctggggctgctggtgcagttctgcacgagtcacaaggagatggacgtgagcgccctactggacttttacatgaagaacatcctgatgagcaaagtcaagcctccgaagtacctgttggatagctgtgcccctctgctccgatacctgtcccactcagaatttaaggatctgatactgcccaccatacagaagtccttactgaggagtccagagaatgttattgaaactatttctagtctgctggcatcagtgacgcttgacctcagccagtatgccatggacatcgtgaaaggactggctggtcacctgaaatccaacagtccccgcctgatggatgaagctgtgctggcactgcggaacctggcacgccagtgcagtgactcttcggccatggaatccctgaccaagcacctatttgctatcctcggaggctcggaaggaaaactaactgttgtagcccagaagatgagcgtcctctcagggattgggagcgtcagtcatcacgtggtgtctggaccttccagtcaggtcctgaatgggatcgtggctgagctgttcatcccgttccttcagcaggaagttcatgaagggaccttggtacacgctgtctcagtcctggctctctggtgtaaccgattcactatggaagtgcccaagaagctcactgaatggttcaaaaaagctttcagccttaaaacctccacatctgcggtgaggcatgcctacctgcagtgcatgttggcctcttaccggggtgacacgctgttgcaggccctggacttactgcccttgctcatccagacagtggagaaggcagcctcccaaagcactcaggttcccaccatcactgaaggggttgccgcagccttgttgctcttaaagttgtcagtggctgactcacaggctgaggccaaactgagcagtttctggcagttgattgtggatgagaaaaagcaggttttcacttctgagaaattcctggtcatggcttcagaggatgccctgtgtactgtgttgcatctgacagagagacttttccttgaccacccgcatagactcactggcaacaaagttcagcagtaccaccgggctctggtggcggtgctcctgagccgcacctggcacgtccgcaggcaggctcagcagacagttcggaagctgctgtcctctcttgggggctttaagctggcgcacggactcttggaggagctgaagactgtcctcagttctcacaaggtgctgcccttagaggctttggtgactgatgctggagaggtgactgaggcaggcaaggcctacgtgcctccacgggtcctgcaggaggctctgtgtgtcatctccggtgtgccagggctcaagggtgatgtcaccgacactgaacaactggcccaggaaatgctgatcatctcccaccacccatccttaggtccgtggctgcggtggtcctccatgaatgccatgggctccctttccgtcctgtcgccggaccgggtcctcccacagctcatcagcaccatcactgcctccgtgcagaaccctgcactgcgcctggtgacgcgggaggagtttgccattatgcagacccctgctggggagctgtatgacaaatccatcattcagagtgcccagcaggacagcataaaaaaggccaacatgaagcgagagaacaaagcttattccttcaaagagcagatcatcgagctggagctgaaggaggagataaagaagaagaaaggcatcaaagaggaggtgcagctgaccagcaagcagaaggagatgctgcaggcccagctagacagggaggcgcaggtccggaggcggctgcaggagctggatggggagctggaggcggcgcttggactgctggacatcatcctggccaagaacccgtccggcctgacccagtacatccctgttttggtcgactcttttctgcccttgctgaagtctcccctggctgctcccaggatcaagaaccccttcttgtccttggctgcctgtgtcatgccctctaggctcaaggctttgggcactttggtgagccacgtgaccctgcgcctgctgaagccagagtgtgtcctggataagtcctggtgccaggaagagctgtcggtggctgtgaagagggcggtgatgctgctgcacacccacaccatcaccagcagggtgggcaagggggagccaggtgctgcgcccttgtccgcgccagccttctccttagtcttcccgtttctgaagatggtgctgacggagatgccccaccacagtgaggaggaggaggagtggatggcccagattcttcagatcctcactgtccaagcccagctgagggcctcccccaacaccccacccgggcgggtggacgagaatggcccggagttgctgcctcgcgtggccatgctgcgtcttctgacttgggtgatcgggacgggctcgcctcgcttacaggttctggcttcagacaccctgaccaccctgtgtgccagcagcagtggtgatgatggctgtgcctttgcagagcaggaggaggtggacgtgctgctctgtgccttgcagtccccgtgtgccagcgtgcgggaaaccgtgctccgggggctgatggaactccacatggtattgccagcacctgatactgatgagaagaatggcctgaaccttctgcggagactctgggtggtcaagtttgacaaggaggaggagatccggaagctggctgagaggctctggtcaatgatgggcctagacctgcagccagacctctgctccttgctgattgacgacgtgatctatcatgaggcggctgtaaggcaggcaggggccgaagccctctcccaagcagtggcacgttaccagcggcaggcggcggaggttatgggcaggctcatggagatttaccaggaaaagctctaccggccgcccccagtgctggatgctttgggacgagttatttcagaatctcctccagatcagtgggaagccaggtgtggcttggcgttggccctcaacaagctctcccagtatttggacagctctcaggtgaagccactctttcagttttttgtccctgatgccctcaatgaccgacacccagatgtccggaagtgcatgttggatgcagccctcgcaacgctcaacactcatgggaaggagaacgtcaactcgctgttgccagtattcgaggagttcctgaagaacgcgcccaatgatgccagctatgatgctgtgcgacagagtgtggtggtcctgatgggctctctggccaagcacctggacaagagtgaccccaaagtgaagcccattgttgccaagctcatcgctgccctctccaccccctcccagcaggtccaggagtccgtagccagctgcttgccacccctcgtgccagccatcaaggaggatgctggagggatgatccagaggcttatgcagcagctgctggagtcagacaagtacgcagagcgcaaaggggccgcctatggcctggcgggcctggtgaagggcctgggcatcctctcgctgaagcaacaggagatgatggcggcactgactgatgccatccaagataagaagaacttccgccggcgagagggagccctctttgccttcgagatgctctgcaccatgctggggaaactttttgagccgtatgtggttcacgtgctgccccatctgctcctgtgctttggggatggaaaccagtatgtgcgtgaggctgcagatgactgtgccaaggctgtgatgagcaacttgagtgctcacggggtgaagctggtgctcccctccttactggctgccctggaggaggaatcgtggcggaccaaagctgggtcagtggagcttcttggggcaatggcgtactgtgctcctaagcagctgtcatcctgtctacccaacattgtgcccaagcttacggaggtgctgaccgactcccatgtcaaagtccagaaggctggacagcaggcgctcaggcagatcggctccgttatcaggaacccggagatcctggccattgctccagtcctcctggatgccctgacggatccctccaggaagacccagaagtgcttgcagaccctgctggacaccaagtttgtccacttcattgatgccccatccctggccctcatcatgcccattgtccagagagccttccaggaccgttccacggacacgcggaagatggcagcccagattattggcaacatgtactccctgacagaccagaaggacttggctccgtacctgcccagcgtgacgcctggcctgaaagcatcgcttttggaccctgtgcctgaggtgcggaccgtatctgcaaaggcccttggggccatggtgaagggcatgggggagtcgtgctttgaggacttgctgccgtggctgatggagacactgacctatgagcagagctctgtggatcgctcaggcgctgcacaggggttggctgaggtcatggccggtttgggggtggagaagttggagaagttgatgccagaaatcgtggctacagccagcaaagtggacattgcaccccatgtccgagatggctacattatgatgtttaactacctgcccatcacctttggagacaagtttactccttatgtggggcccatcatcccctgtatcctcaaagctcttgctgatgagaatgagtttgtgcgtgacaccgccctgcgcgcgggccagcgggttatctccatgtacgctgagacagccatcgccctgctgctgccccagctagagcaaggcctctttgatgacctttggagaatcaggttcagctctgttcagctccttggggatctcctgtttcacatctcaggagtcactgggaagatgaccacagaaactgcctctgaggatgataactttggaactgcccagtccaacaaggcgatcatcactgccctgggggtagagcggcggaaccgggtgttggcagggctgtacatgggccgctcagacacccagctggtggtgcggcaggcgtccctgcatgtctggaagattgttgtctccaataccccccgcaccttgcgtgagatcctacccactctctttgggctcctgctgggtttcctggccagcacgtgtgcagataagagaacgattgcagcgagaacattgggagatcttgtgcggaagttaggggagaaaatcctccccgagatcatccccatccttgaggaaggcctgaggtctcagaagagcgatgagaggcagggtgtgtgcattggcctaagtgagatcatgaagtccaccagccgggatgccgtgctgtatttctctgaatccctcgtgcccacggcaaggaaggctttgtgtgacccactggaggaggtcagagaggcggcagccaagactttcgagcagctgcattccaccatcggccaccaggctctggaggacattctcccatttttactaaagcagctggatgacgaggaggtgtcagagtttgccttggatggtctgaagcaagtcatggctattaagagtcgtgtggtgctgccctaccttgtgcccaagctgacaacgccacctgtcaacacccgggtgctggctttcctttcgtcagtggctggtgatgccctcacccgtcatcttggcgtgatcctcccagcggtcatgctggccctgaaggaaaagcttgggaccccagatgagcagctggagatggccaattgtcaggctgtgatcctctccgtagaggatgacacagggcaccggatcatcatcgaggatctgctggaggccacccgcagccctgaggtgggcatgaggcaagctgctgccatcatcctcaacatctactgttcccgctcaaaggctgactacaccagccacctgcggagcctggtctcgggcctgatccgcctcttcaatgactccagccctgtggttctggaggagagctgggatgccctaaatgccatcactaagaagctggatgctggcaaccagttggcactcattgaagagctgcacaaggaaatccggctcatagggaacgagagcaaaggcgagcatgtgccaggattctgcctcccgaagaagggagtgacctccatccttccagtgttgcgggaaggagtcctgactggcagccctgagcagaaggaggaggcagccaaagccttaggcttggtaatccgcctgacctcggctgacgccctgaggccctccgtggtcagcatcactggccctctgatccgcatcctgggggacaggttcagctggaatgtgaaggcggctctgctcgagacactcagcctcttgttggctaaggttgggattgccctgaagcccttcctgccccagctgcagaccactttcaccaaagccctgcaggactccaaccggggggtgcgcctgaaggccgcagatgctctggggaagctcatttccatccacattaaggtggaccccctcttcacagagctgctcaatggcatccgcgccatggaggacccaggtgtcagggacaccatgctgcaggccctgaggtttgtgattcagggagcaggggccaaagtggatgccgtcatccggaaaaacatcgtctcactcctgctgagcatgctgggacacgatgaggacaacactcgcatctcctcagccgggtgcctaggggaactgtgtgcctttttgactgaagaggagcttagtgccgttctacagcagtgcttgctggcggacgtgtccggcattgactggatggttcggcacgggcggagcctggcactttccgtggctgtgaatgtggctcctggcagactttgtgccggcagatatagcagtgatgttcaggaaatgatcctgagcagtgccacggcggacaggatccccattgcggtgagcggggtccggggcatgggctttctcatgagacaccacatcgagacaggcggagggcagttgccggccaaactttccagcctgttcgttaagtgtctgcagaacccatccagcgacatcaggctggtggctgagaagatgatctggtgggcaaataaggacccactgcctcccctggacccccaggccatcaagcccatcctgaaggctcttcttgacaacaccaaggataagaacaccgtggtcagggcctacagcgaccaggcaattgtcaacctcctcaagatgcggcagggtgaagaggtgtttcagtccctctccaagatcctggatgtggccagtttggaggtgctgaacgaggttaaccgaaggtccctgaagaagctggccagccaggccgactccacggagcaggtggacgacaccatcctgacatgagaggcctgggccagcagcagcattgccgctccacatctttgctcaatgttttcatttttgaaaatacatttgttccaatggggagcttggaagatggcgttcccagaaagtattttaatatcaatagaccacagccaaagccttaaatcaaacccacacacaactgaaaattgcctcctccatctctcaccttttcctgtggagaagagaaggaaaagcacacgcatgcgcctcagcaaatggcattcccaagtctggggaggggtataggtttgaaaggctgtttgaaagaggaatgtttaataaaggctttgattt

SEQ ID NO: 1320 - DNA, 8668 bp, Homo sapiens
cagccccggcaggatggcggcggacacgcaggtttccgagacactaaagcgttttgcagggaaggtgacaacagccagtgtaaaggaacggagagaaatcctcagtgaacttgggaagtgtgttgctggaaaagatcttccagagggagcagtgaaggggctctgcaaattgttctgcttgactctgcatcgatatagagatgcagcctcccgcagggccttgcaggcagccatccagcagttggctgaggcccagccagaagccactgctaagaaccttctacactctctgcagtcttctggtataggctccaaagcaggtgttcccagtaagagcagtggctctgccgccttgctggccttgacctggacctgcctcctggtgcgcattgtctttccatcgagagccaagcgacaaggagacatctggaacaaactggtggaagtgcagtgcctgctcttgctggaggtgctgggtggctcccacaagcacgccgtggatggtgctgtgaagaaactcacgaagctgtggaaagagaaccccgggctggtggaacagtacttgtcagccattctcagcctagagcccaaccagaactatgctggcatgctggggctgctggtgcagttctgcacgagtcacaaggagatggacgtggtcagtcagcacaagagcgccctactggacttttacatgaagaacatcctgatgagcaaagtcaagcctccgaagtacctgttggatagctgtgcccctctgctccgatacctgtcccactcagaatttaaggatctgatactgcccaccatacagaagtccttactgaggagtccagagaatgttattgaaactatttctagtctgctggcatcagtgacgcttgacctcagccagtatgccatggacatcgtgaaaggactggctggtcacctgaaatccaacagtccccgcctgatggatgaagctgtgctggcactgcggaacctggcacgccagtgcagtgactcttcggccatggaatccctgaccaagcacctatttgctatcctcggaggctcggaaggaaaactaactgttgtagcccagaagatgagcgtcctctcagggattgggagcgtcagtcatcacgtggtgtctggaccttccagtcaggtcctgaatgggatcgtggctgagctgttcatcccgttccttcagcaggaagttcatgaagggaccttggtacacgctgtctcagtcctggctctctggtgtaaccgattcactatggaagtgcccaagaagctcactgaatggttcaaaaaagctttcagccttaaaacctccacatctgcggtgaggcatgcctacctgcagtgcatgttggcctcttaccggggtgacacgctgttgcaggccctggacttactgcccttgctcatccagacagtggagaaggcagcctcccaaagcactcaggttcccaccatcactgaaggggttgccgcagccttgttgctcttaaagttgtcagtggctgactcacaggctgaggccaaactgagcagtttctggcagttgattgtggatgagaaaaagcaggttttcacttctgagaaattcctggtcatggcttcagaggatgccctgtgtactgtgttgcatctgacagagagacttttccttgaccacccgcatagactcactggcaacaaagttcagcagtaccaccgggctctggtggcggtgctcctgagccgcacctggcacgtccgcaggcaggctcagcagacagttcggaagctgctgtcctctcttgggggctttaagctggcgcacggactcttggaggagctgaagactgtcctcagttctcacaaggtgctgcccttagaggctttggtgactgatgctggagaggtgactgaggcaggcaaggcctacgtgcctccacgggtcctgcaggaggctctgtgtgtcatctccggtgtgccagggctcaagggtgatgtcaccgacactgaacaactggcccaggaaatgctgatcatctcccaccacccatccttagttgccgtgcagtctggactttggccagcacttcttgccaggatgaagatcgatcctgaagcctttatcaccaggcacctggatcagatcattcccaggatgaccacacagagtcccctaaaccagtcctccatgaatgccatgggctccctttccgtcctgtcgccggaccgggtcctcccacagctcatcagcaccatcactgcctccgtgcagaaccctgcactgcgcctggtgacgcgggaggagtttgccattatgcagacccctgctggggagctgtatgacaaatccatcattcagagtgcccagcaggacagcataaaaaaggccaacatgaagcgagagaacaaagcttattccttcaaagagcagatcatcgagctggagctgaaggaggagataaagaagaagaaaggcatcaaagaggaggtgcagctgaccagcaagcagaaggagatgctgcaggcccagctagacagggaggcgcaggtccggaggcggctgcaggagctggatggggagctggaggcggcgcttggactgctggacatcatcctggccaagaacccgtccggcctgacccagtacatccctgttttggtcgactcttttctgcccttgctgaagtctcccctggctgctcccaggatcaagaaccccttcttgtccttggctgcctgtgtcatgccctctaggctcaaggctttgggcactttggtgagccacgtgaccctgcgcctgctgaagccagagtgtgtcctggataagtcctggtgccaggaagagctgtcggtggctgtgaagagggcggtgatgctgctgcacacccacaccatcaccagcagggtgggcaagggggagccaggtgctgcgcccttgtccgcgccagccttctccttagtcttcccgtttctgaagatggtgctgacggagatgccccaccacagtgaggaggaggaggagtggatggcccagattcttcagatcctcactgtccaagcccagctgagggcctcccccaacaccccacccgggcgggtggacgagaatggcccggagttgctgcctcgcgtggccatgctgcgtcttctgacttgggtgatcgggacgggctcgcctcgcttacaggttctggcttcagacaccctgaccaccctgtgtgccagcagcagtggtgatgatggctgtgcctttgcagagcaggaggaggtggacgtgctgctctgtgccttgcagtccccgtgtgccagcgtgcgggaaaccgtgctccgggggctgatggaactccacatggtattgccagcacctgatactgatgagaagaatggcctgaaccttctgcggagactctgggtggtcaagtttgacaaggaggaggagatccggaagctggctgagaggctctggtcaatgatgggcctagacctgcagccagacctctgctccttgctgattgacgacgtgatctatcatgaggcggctgtaaggcaggcaggggccgaagccctctcccaagcagtggcacgttaccagcggcaggcggcggaggttatgggcaggctcatggagatttaccaggaaaagctctaccggccgcccccagtgctggatgctttgggacgagttatttcagaatctcctccagatcagtgggaagccaggtgtggcttggcgttggccctcaacaagctctcccagtatttggacagctctcaggtgaagccactctttcagttttttgtccctgatgccctcaatgaccgacacccagatgtccggaagtgcatgttggatgcagccctcgcaacgctcaacactcatgggaaggagaacgtcaactcgctgttgccagtattcgaggagttcctgaagaacgcgcccaatgatgccagctatgatgctgtgcgacagagtgtggtggtcctgatgggctctctggccaagcacctggacaagagtgaccccaaagtgaagcccattgttgccaagctcatcgctgccctctccaccccctcccagcaggtccaggagtccgtagccagctgcttgccaccccttgtgccagccatcaaggaggatgctggagggatgatccagaggcttatgcagcagctgctggagtcagacaagtacgcagagcgcaaaggggccgcctatggcctggcgggcctggtgaagggcctgggcatcctctcgctgaagcaacaggagatgatggcggcactgactgatgccatccaagataagaagaacttccgccggcgagagggagccctctttgccttcgagatgctctgcaccatgctggggaaactttttgagccgtatgtggttcacgtgctgccccatctgctcctgtgctttggggatggaaaccagtatgtgcgtgaggctgcagatgactgtgccaaggctgtgatgagcaacttgagtgctcacggggtgaagctggtgctcccctccttactggctgccctggaggaggaatcgtggcggaccaaagctgggtcagtggagcttcttggggcaatggcgtactgtgctcctaagcagctgtcatcctgtctacccaacattgtgcccaagcttacggaggtgctgaccgactcccatgtcaaagtccagaaggctggacagcaggcgctcaggcagatcggctccgttatcaggaacccggagatcctggccattgctccagtcctcctggatgccctgacggatccctccaggaagacccagaagtgcttgcagaccctgctggacaccaagtttgtccacttcattgatgccccatccctggccctcatcatgcccattgtccagagagccttccaggaccgttccacggacacgcggaagatggcagcccagattattggcaacatgtactccctgacagaccagaaggacttggctccgtacctgcccagcgtgacgcctggcctgaaagcatcgcttttggaccctgtgcctgaggtgcggaccgtatctgcaaaggcccttggggccatggtgaagggcatgggggagtcgtgctttgaggacttgctgccgtggctgatggagacactgacctatgagcagagctctgtggatcgctcaggcgctgcacaggggttggctgaggtcatggccggtttgggggtggagaagttggagaagttgatgccagaaatcgtggctacagccagcaaagtggacattgcaccccatgtccgagatggctacattatgatgtttaactacctgcccatcacctttggagacaagtttactccttatgtggggcccatcatcccctgtatcctcaaagctcttgctgatgagaatgagtttgtgcgtgacaccgccctgcgcgcgggccagcgggttatctccatgtacgctgagacagccatcgccctgctgctgccccagctagagcaaggcctctttgatgacctttggagaatcaggttcagctctgttcagctccttggggatctcctgtttcacatctcaggagtcactgggaagatgaccacagaaactgcctctgaggatgataactttggaactgcccagtccaacaaggcgatcatcactgccctgggggtagagcggcggaaccgggtgttggcagggctgtacatgggccgctcagacacccagctggtggtgcggcaggcgtccctgcatgtctggaagattgttgtctccaataccccccgcaccttgcgtgagatcctacccactctctttgggctcctgctgggtttcctggccagcacgtgtgcagataagagaacgattgcagcgagaacattgggagatcttgtgcggaagttaggggagaaaatcctccccgagatcatccccatccttgaggaaggcctgaggtctcagaagagcgatgagaggcagggtgtgtgcattggcctaagtgagatcatgaagtccaccagccgggatgccgtgctgtatttctctgaatccctcgtgcccacggcaaggaaggctttgtgtgacccactggaggaggtcagagaggcggcagccaagactttcgagcagctgcattccaccatcggccaccaggctctggaggacattctcccatttttactaaagcagctggatgacgaggaggtgtcagagtttgccttggatggtctgaagcaagtcatggctattaagagtcgtgtggtgctgccctaccttgtgcccaagctgacaacgccacctgtcaacacccgggtgctggctttcctttcgtcagtggctggtgatgccctcacccgtcatcttggcgtgatcctcccagcggtcatgctggccctgaaggaaaagcttgggaccccagatgagcagctggagatggccaattgtcaggctgtgatcctctccgtagaggatgacacagggcaccggatcatcatcgagtatctgctggaggccacccgcagccctgaggtgggcatgaggcaagctgctgccatcatcctcaacatctactgttcccgctcaaaggctgactacaccagccacctgcggagcctggtctcgggcctgatccgcctcttcaatgactccagccctgtggttctggaggagagctgggatgccctaaatgccatcactaagaagctggatgctggcaaccagttggcactcattgaagagctgcacaaggaaatccggctcatagggaacgagagcaaaggcgagcatgtgccaggattctgcctcccgaagaagggagtgacctccatccttccagtgttgcgggaaggagtcctgactggcagccctgagcagaaggaggaggcagccaaagccttaggcttggtaatccgcctgacctcggctgacgccctgaggccctccgtggtcagcatcactggccctctgatccgcatcctgggggacaggttcagctggaatgtgaaggcggctctgctcgagacactcagcctcttgttggctaaggttgggattgccctgaagcccttcctgccccagctgcagaccactttcaccaaagccctgcaggactccaaccggggggtgcgcctgaaggccgcagatgctctggggaagctcatttccatccacattaaggtggaccccctcttcacagagctgctcaatggcatccgcgccatggaggacccaggtgtcagggacaccatgctgcaggccctgaggtttgtgattcagggagcaggggccaaagtggatgccgtcatccggaaaaacatcgtctcactcctgctgagcatgctgggacacgatgaggacaacactcgcatctcctcagccgggtgcctaggggaactgtgtgcctttttgactgaagaggagcttagtgccgttctacagcagtgcttgctggcggacgtgtccggcattgactggatggttcggcacgggcggagcctggcactttccgtggctgtgaatgtggctcctggcagactttgtgccggcagatatagcagtgatgttcaggaaatgatcctgagcagtgccacggcggacaggatccccattgcggtgagcggggtccggggcatgggctttctcatgagacaccacatcgagacaggcggagggcagttgccggccaaactttccagcctgttcgttaagtgtctgcagaacccatccagcgacatcaggctggtggctgagaagatgatctggtgggcaaataaggacccactgcctcccctggacccccaggccatcaagcccatcctgaaggctcttcttgacaacaccaaggataagaacaccgtggtcagggcctacagcgaccaggcaattgtcaacctcctcaagatgcggcagggtgaagaggtgtttcagtccctctccaagatcctggatgtggccagtttggaggtgctgaacgaggttaaccgaaggtccctgaagaagctggccagccaggccgactccacggagcaggtggacgacaccatcctgacatgagaggcctgggccagcagcagcattgccgctccacatctttgctcaatgttttcatttttgaaaatacatttgttccaatggggagcttggaagatggcgttcccagaaagtattttaatatcaatagaccacagccaaagccttaaatcaaacccacacacaactgaaaattgcctcctccatctctcaccttttcctgtggagaagagaaggaaaagcacacgcatgcgcctcagcaaatggcagcccaggagctgtttgtccagtttagcatggctaggtctggaactataatagcagggtcagactgtgggttcctcttctcctgtgcttgagctctggtttgagagctggcgctaccaacctttttcctatatcccgagtggggcacagacggtggatctctgcccagtgtggtgtgtctggcttggcttttcaatattgtgaggtctgaatggatctgacccctgtcagatgaaaatgattcacagctctggcagttcccaagtctggggaggggtataggtttgaaaggctgtttgaaagaggaatgtttaataaaggctttgatttaatcttgatataaacagatttttaaaaatctccacccattaaacatgaagcttcctgcatcaggaa

SEQ ID NO: 1321 - DNA, 8538 bp, Homo sapiens
caggtttccgagacactaaagcgttttgcagggaaggtgacaacagccagtgtaaaggaacggagagaaatcctcagtgaacttgggaagtgtgttgctggaaaagatcttccagagggagcagtgaaggggctctgcaaattgttctgcttgactctgcatcgatatagagatgcagcctcccgcagggccttgcaggcagccatccagcagttggctgaggcccagccagaagccactgctaagaaccttctacactctctgcagtcttctggtataggctccaaagcaggtgttcccagtaagagcagtggctctgccgccttgctggccttgacctggacctgcctcctggtgcgcattgtctttccatcgagagccaagcgacaaggagacatctggaacaaactggtggaagtgcagtgcctgctcttgctggaggtgctgggtggctcccacaagcacgccgtggatggtgctgtgaagaaactcacgaagctgtggaaagaggtgacaggactgcaggggctgaaccccgggctggtggaacagtacttgtcagccattctcagcctagagcccaaccagaactatgctggcatgctggggctgctggtgcagttctgcacgagtcacaaggagatggacgtgagcgccctactggacttttacatgaagaacatcctgatgagcaaagtcaagcctccgaagtacctgttggatagctgtgcccctctgctccgatacctgtcccactcagaatttaaggatctgatactgcccaccatacagaagtccttactgaggagtccagagaatgttattgaaactatttctagtctgctggcatcagtgacgcttgacctcagccagtatgccatggacatcgtgaaaggactggctggtcacctgaaatccaacagtccccgcctgatggatgaagctgtgctggcactgcggaacctggcacgccagtgcagtgactcttcggccatggaatccctgaccaagcacctatttgctatcctcggaggctcggaaggaaaactaactgttgtagcccagaagatgagcgtcctctcagggattgggagcgtcagtcatcacgtggtgtctggaccttccagtcaggtcctgaatgggatcgtggctgagctgttcatcccgttccttcagcaggaagttcatgaagggaccttggtacacgctgtctcagtcctggctctctggtgtaaccgattcactatggaagtgcccaagaagctcactgaatggttcaaaaaagctttcagccttaaaacctccacatctgcggtgaggcatgcctacctgcagtgcatgttggcctcttaccggggtgacacgctgttgcaggccctggacttactgcccttgctcatccagacagtggagaaggcagcctcccaaagcactcaggttcccaccatcactgaaggggttgccgcagccttgttgctcttaaagttgtcagtggctgactcacaggctgaggccaaactgagcagtttctggcagttgattgtggatgagaaaaagcaggttttcacttctgagaaattcctggtcatggcttcagaggatgccctgtgtactgtgttgcatctgacagagagacttttccttgaccacccgcatagactcactggcaacaaagttcagcagtaccaccgggctctggtggcggtgctcctgagccgcacctggcacgtccgcaggcaggctcagcagacagttcggaagctgctgtcctctcttgggggctttaagctggcgcacggactcttggaggagctgaagactgtcctcagttctcacaaggtgctgcccttagaggctttggtgactgatgctggagaggtgactgaggcaggcaaggcctacgtgcctccacgggtcctgcaggaggctctgtgtgtcatctccggtgtgccagggctcaagggtgatgtcaccgacactgaacaactggcccaggaaatgctgatcatctcccaccacccatccttaggtccgtggctgcggtggtcctccatgaatgccatgggctccctttccgtcctgtcgccggaccgggtcctcccacagctcatcagcaccatcactgcctccgtgcagaaccctgcactgcgcctggtgacgcgggaggagtttgccattatgcagacccctgctggggagctgtatgacaaatccatcattcagagtgcccagcaggacagcataaaaaaggccaacatgaagcgagagaacaaagcttattccttcaaagagcagatcatcgagctggagctgaaggaggagataaagaagaagaaaggcatcaaagaggaggtgcagctgaccagcaagcagaaggagatgctgcaggcccagctagacagggaggcgcaggtccggaggcggctgcaggagctggatggggagctggaggcggcgcttggactgctggacatcatcctggccaagaacccgtccggcctgacccagtacatccctgttttggtcgactcttttctgcccttgctgaagtctcccctggctgctcccaggatcaagaaccccttcttgtccttggctgcctgtgtcatgccctctaggctcaaggctttgggcactttggtgagccacgtgaccctgcgcctgctgaagccagagtgtgtcctggataagtcctggtgccaggaagagctgtcggtggctgtgaagagggcggtgatgctgctgcacacccacaccatcaccagcagggtgggcaagggggagccaggtgctgcgcccttgtccgcgccagccttctccttagtcttcccgtttctgaagatggtgctgacggagatgccccaccacagtgaggaggaggaggagtggatggcccagattcttcagatcctcactgtccaagcccagctgagggcctcccccaacaccccacccgggcgggtggacgagaatggcccggagttgctgcctcgcgtggccatgctgcgtcttctgacttgggtgatcgggacgggctcgcctcgcttacaggttctggcttcagacaccctgaccaccctgtgtgccagcagcagtggtgatgatggctgtgcctttgcagagcaggaggaggtggacgtgctgctctgtgccttgcagtccccgtgtgccagcgtgcgggaaaccgtgctccgggggctgatggaactccacatggtattgccagcacctgatactgatgagaagaatggcctgaaccttctgcggagactctgggtggtcaagtttgacaaggaggaggagatccggaagctggctgagaggctctggtcaatgatgggcctagacctgcagccagacctctgctccttgctgattgacgacgtgatctatcatgaggcggctgtaaggcaggcaggggccgaagccctctcccaagcagtggcacgttaccagcggcaggcggcggaggttatgggcaggctcatggagatttaccaggaaaagctctaccggccgcccccagtgctggatgctttgggacgagttatttcagaatctcctccagatcagtgggaagccaggtgtggcttggcgttggccctcaacaagctctcccagtatttggacagctctcaggtgaagccactctttcagttttttgtccctgatgccctcaatgaccgacacccagatgtccggaagtgcatgttggatgcagccctcgcaacgctcaacactcatgggaaggagaacgtcaactcgctgttgccagtattcgaggagttcctgaagaacgcgcccaatgatgccagctatgatgctgtgcgacagagtgtggtggtcctgatgggctctctggccaagcacctggacaagagtgaccccaaagtgaagcccattgttgccaagctcatcgctgccctctccaccccctcccagcaggtccaggagtccgtagccagctgcttgccacccctcgtgccagccatcaaggaggatgctggagggatgatccagaggcttatgcagcagctgctggagtcagacaagtacgcagagcgcaaaggggccgcctatggcctggcgggcctggtgaagggcctgggcatcctctcgctgaagcaacaggagatgatggcggcactgactgatgccatccaagataagaagaacttccgccggcgagagggagccctctttgccttcgagatgctctgcaccatgctggggaaactttttgagccgtatgtggttcacgtgctgccccatctgctcctgtgctttggggatggaaaccagtatgtgcgtgaggctgcagatgactgtgccaaggctgtgatgagcaacttgagtgctcacggggtgaagctggtgctcccctccttactggctgccctggaggaggaatcgtggcggaccaaagctgggtcagtggagcttcttggggcaatggcgtactgtgctcctaagcagctgtcatcctgtctacccaacattgtgcccaagcttacggaggtgctgaccgactcccatgtcaaagtccagaaggctggacagcaggcgctcaggcagatcggctccgttatcaggaacccggagatcctggccattgctccagtcctcctggatgccctgacggatccctccaggaagacccagaagtgcttgcagaccctgctggacaccaagtttgtccacttcattgatgccccatccctggccctcatcatgcccattgtccagagagccttccaggaccgttccacggacacgcggaagatggcagcccagattattggcaacatgtactccctgacagaccagaaggacttggctccgtacctgcccagcgtgacgcctggcctgaaagcatcgcttttggaccctgtgcctgaggtgcggaccgtatctgcaaaggcccttggggccatggtgaagggcatgggggagtcgtgctttgaggacttgctgccgtggctgatggagacactgacctatgagcagagctctgtggatcgctcaggcgctgcacaggggttggctgaggtcatggccggtttgggggtggagaagttggagaagttgatgccagaaatcgtggctacagccagcaaagtggacattgcaccccatgtccgagatggctacattatgatgtttaactacctgcccatcacctttggagacaagtttactccttatgtggggcccatcatcccctgtatcctcaaagctcttgctgatgagaatgagtttgtgcgtgacaccgccctgcgcgcgggccagcgggttatctccatgtacgctgagacagccatcgccctgctgctgccccagctagagcaaggcctctttgatgacctttggagaatcaggttcagctctgttcagctccttggggatctcctgtttcacatctcaggagtcactgggaagatgaccacagaaactgcctctgaggatgataactttggaactgcccagtccaacaaggcgatcatcactgccctgggggtagagcggcggaaccgggtgttggcagggctgtacatgggccgctcagacacccagctggtggtgcggcaggcgtccctgcatgtctggaagattgttgtctccaataccccccgcaccttgcgtgagatcctacccactctctttgggctcctgctgggtttcctggccagcacgtgtgcagataagagaacgattgcagcgagaacattgggagatcttgtgcggaagttaggggagaaaatcctccccgagatcatccccatccttgaggaaggcctgaggtctcagaagagcgatgagaggcagggtgtgtgcattggcctaagtgagatcatgaagtccaccagccgggatgccgtgctgtatttctctgaatccctcgtgcccacggcaaggaaggctttgtgtgacccactggaggaggtcagagaggcggcagccaagactttcgagcagctgcattccaccatcggccaccaggctctggaggacattctcccatttttactaaagcagctggatgacgaggaggtgtcagagtttgccttggatggtctgaagcaagtcatggctattaagagtcgtgtggtgctgccctaccttgtgcccaagctgacaacgccacctgtcaacacccgggtgctggctttcctttcgtcagtggctggtgatgccctcacccgtcatcttggcgtgatcctcccagcggtcatgctggccctgaaggaaaagcttgggaccccagatgagcagctggagatggccaattgtcaggctgtgatcctctccgtagaggatgacacagggcaccggatcatcatcgaggatctgctggaggccacccgcagccctgaggtgggcatgaggcaagctgctgccatcatcctcaacatctactgttcccgctcaaaggctgactacaccagccacctgcggagcctggtctcgggcctgatccgcctcttcaatgactccagccctgtggttctggaggagagctgggatgccctaaatgccatcactaagaagctggatgctggcaaccagttggcactcattgaagagctgcacaaggaaatccggctcatagggaacgagagcaaaggcgagcatgtgccaggattctgcctcccgaagaagggagtgacctccatccttccagtgttgcgggaaggagtcctgactggcagccctgagcagaaggaggaggcagccaaagccttaggcttggtaatccgcctgacctcggctgacgccctgaggccctccgtggtcagcatcactggccctctgatccgcatcctgggggacaggttcagctggaatgtgaaggcggctctgctcgagacactcagcctcttgttggctaaggttgggattgccctgaagcccttcctgccccagctgcagaccactttcaccaaagccctgcaggactccaaccggggggtgcgcctgaaggccgcagatgctctggggaagctcatttccatccacattaaggtggaccccctcttcacagagctgctcaatggcatccgcgccatggaggacccaggtgtcagggacaccatgctgcaggccctgaggtttgtgattcagggagcaggggccaaagtggatgccgtcatccggaaaaacatcgtctcactcctgctgagcatgctgggacacgatgaggacaacactcgcatctcctcagccgggtgcctaggggaactgtgtgcctttttgactgaagaggagcttagtgccgttctacagcagtgcttgctggcggacgtgtccggcattgactggatggttcggcacgggcggagcctggcactttccgtggctgtgaatgtggctcctggcagactttgtgccggcagatatagcagtgatgttcaggaaatgatcctgagcagtgccacggcggacaggatccccattgcggtgagcggggtccggggcatgggctttctcatgagacaccacatcgagacaggcggagggcagttgccggccaaactttccagcctgttcgttaagtgtctgcagaacccatccagcgacatcaggctggtggctgagaagatgatctggtgggcaaataaggacccactgcctcccctggacccccaggccatcaagcccatcctgaaggctcttcttgacaacaccaaggataagaacaccgtggtcagggcctacagcgaccaggcaattgtcaacctcctcaagatgcggcagggtgaagaggtgtttcagtccctctccaagatcctggatgtggccagtttggaggtgctgaacgaggttaaccgaaggtccctgaagaagctggccagccaggccgactccacggagcaggtggacgacaccatcctgacatgagaggcctgggccagcagcagcattgccgctccacatctttgctcaatgttttcatttttgaaaatacatttgttccaatggggagcttggaagatggcgttcccagaaagtattttaatatcaatagaccacagccaaagccttaaatcaaacccacacacaactgaaaattgcctcctccatctctcaccttttcctgtggagaagagaaggaaaagcacacgcatgcgcctcagcaaatggcagcccaggagctgtttgtccagtttagcatggctaggtctggaactataatagcagggtcagactgtgggttcctcttctcctgtgcttgagctctggtttgagagctggcgctaccaacctttttcctatatcccgagtggggcacagacggtggatctctgcccagtgtggtgtgtctggcttggcttttcaatattgtgaggtctgaatggatctgatccctgtcagatgaaaatgattcacagctctggcagttcccaagtctggggaggggtataggtttgaaaggctgtttgaaagaggaatgtttaataaaggctttgatttaatcttgatataaacagatttttaaaaatctccacccattaaacatgaagcttcctgcatcaggaa

SEQ ID NO: 1322 - DNA, 3127 bp, Homo sapiens
gagatacccggccagacaccctcacctgcggtgcccagctgcccaggctgaggcaagagaaggccagaaaccatgcccatggggtctctgcaaccgctggccaccttgtacctgctggggatgctggtcgcttcctgcctcggacggctcagctggtatgacccagatttccaggcaaggctcacccgttccaactcgaagtgccagggccagctggaggtctacctcaaggacggatggcacatggtttgcagccagagctggggccggagctccaagcagtgggaggaccccagtcaagcgtcaaaagtctgccagcggctgaactgtggggtgcccttaagccttggccccttccttgtcacctacacacctcagagctcaatcatctgctacggacaactgggctccttctccaactgcagccacagcagaaatgacatgtgtcactctctgggcctgacctgcttagaaccccagaagacaacacctccaacgacaaggcccccgcccaccacaactccagagcccacagctcctcccaggctgcagctggtggcacagtctggcggccagcactgtgccggcgtggtggagttctacagcggcagcctggggggtaccatcagctatgaggcccaggacaagacccaggacctggagaacttcctctgcaacaacctccagtgtggctccttcttgaagcatctgccagagactgaggcaggcagagcccaagacccaggggagccacgggaacaccagcccttgccaatccaatggaagatccagaactcaagctgtacctccctggagcattgcttcaggaaaatcaagccccagaaaagtggccgagttcttgccctcctttgctcaggtttccagcccaaggtgcagagccgtctggtggggggcagcagcatctgtgaaggcaccgtggaggtgcgccagggggctcagtgggcagccctgtgtgacagctcttcagccaggagctcgctgcggtgggaggaggtgtgccgggagcagcagtgtggcagcgtcaactcctatcgagtgctggacgctggtgacccaacatcccgggggctcttctgtccccatcagaagctgtcccagtgccacgaactttgggagagaaattcctactgcaagaaggtgtttgtcacatgccaggatccaaaccccgcaggcctggccgcaggcacggtggcaagcatcatcctggccctggtgctcctggtggtgctgctggtcgtgtgcggcccccttgcctacaagaagctagtgaagaaattccgccagaagaagcagcgccagtggattggcccaacgggaatgaaccaaaacatgtctttccatcgcaaccacacggcaaccgtccgatcccatgctgagaaccccacagcctcccacgtggataacgaatacagccaacctcccaggaactcccgcctgtcagcttatccagctctggaaggggctctgcatcgctcctccatgcagcctgacaactcctccgacagtgactatgatctgcatggggctcagaggctgtaaagaactgggatccatgagcaaaaagccgagagccagacctgtttgtcctgagaaaactgtccgctcttcacttgaaatcatgtccctatttctaccccggccagaacatggacagaggccagaagccttccggacaggcgctgctgccccgagtggcaggccagctcacactctgctgcacaacagctcggccgcccctccacttgtggaagctgtggtgggcagagccccaaaacaagcagccttccaactagagactcgggggtgtctgaagggggccccctttccctgcccgctggggagcggcgtctcagtgaaatcggctttctcctcagactctgtccctggtaaggagtgacaaggaagctcacagctgggcgagtgcattttgaatagttttttgtaagtagtgcttttcctccttcctgacaaatcgagcgctttggcctcttctgtgcagcatccacccctgcggatccctctggggaggacaggaaggggactcccggagacctctgcagccgtggtggtcagaggctgctcacctgagcacaaagacagctctgcacattcaccgcagctgccagccaggggtctgggtgggcaccaccctgacccacagcgtcaccccactccctctgtcttatgactcccctccccaaccccctcatctaaagacaccttcctttccactggctgtcaagcccacagggcaccagtgccacccagggcccggcacaaaggggcgcctagtaaaccttaaccaacttggttttttgcttcacccagcaattaaaagtcccaagctgaggtagtttcagtccatcacagttcatcttctaacccaagagtcagagatggggctggtcatgttcctttggtttgaataactcccttgacgaaaacagactcctctagtacttggagatcttggacgtacacctaatcccatggggcctcggcttccttaactgcaagtgagaagaggaggtctacccaggagcctcgggtctgatcaagggagaggccaggcgcagctcactgcggcggctccctaagaaggtgaagcaacatgggaacacatcctaagacaggtcctttctccacgccatttgatgctgtatctcctgggagcacaggcatcaatggtccaagccgcataataagtctggaagagcaaaagggagttactaggatatggggtgggctgctcccagaatctgctcagctttctgcccccaccaacaccctccaaccaggccttgccttctgagagcccccgtggccaagcccaggtcacagatcttcccccgaccatgctgggaatccagaaacagggaccccatttgtcttcccatatctggtggaggtgagggggctcctcaaaagggaactgagaggctgctcttagggagggcaaaggttcgggggcagccagtgtctcccatcagtgccttttttaataaaagctctttcatctatagtttggccaccatacagtggcctcaaagcaaccatggcctacttaaaaaccaaaccaaaaataaagagtttagttgaggagaaa

SEQ ID NO: 1323 - DNA, 1566 bp, Homo sapiens
  misc_feature (22)..(22): n is a, c, g, or t
  misc_feature (24)..(24): n is a, c, g, or t
ctagaagagcaagcccgccagnantgatgaaaactgattttcctggagaccttggcagtcagcgacaagctattccaacaactaagagatcaggactccagtagcagtgagttctgcaccttctggtgacagtgagggtgatgaagaggagacgacacaagatgaagtctcttcccacacatcagaggaagatggaggggtggtcaaagtggagaaagagttagaaaatacagaacagcctgttggtgggaacgaagkgttagagcacgaggtcacagggaatttgaattctgaccccttgcttgaactctgccagtgtcccctctgccagctagactgcgggaccgggagcagttgattgctcacgtgtaccagcacactgcagcagtggtgagcgccaagagctacatgtgtcctgtctgtggccgggcccttagctccccggggtcattgggtcgccacctcttaatccactcggaggaccagcgatctaactgtgctgtgtgtggagcccggttcaccagccatgccacttttaacagtgagaaacttcctgaagtactaaatatggaatccctacccacagtccacaatgagggtccctccagtgctgaggggaaggatattgcctttagtcctccagtgtaccctgctggaattctgcttgtgtgcaacaactgtgctgcctaccgtaaamtgctggaagcccagactcccagtgtasgcaagtgggctctacgtcgacagaatgagcctttggaagtacggctgcagcggctggaacgagagcgcacggccaagaagagccggcgggacaatgagacccccgaggagcgggaggtgaggcgcatgagggaccgtgaagccaagcgcttgcagcgcatgcaggagacagacgagcagcgggcacgccggctgcagcgggatcgggaggccatgaggctgaagcgggccaatgaaaccccggaaaagcggcaggcccggctcatccgagagcgagaggccaagcggctcaagaggaggctggagaaaatggacatgatgttgcgagctcagtttggccaggacccttctgccatggcagccttagcagctgaaatgaacttcttccagctgcctgtaagtggggtggagttggacarccagcttctgggcaagatggcctttgaagagcagaacagcagytytctgcactgaaccacaccctcctgcctgccctccttcccacctacctacccacccacccacacccacagccacgaggaccagtgctgctgccacccacgaggccctgtccttgctgccagaggcaggcctgggtttattgcaggtggacctgagcagcccttgcatatgggaacaggatgatggggtcaggagggacctggctcaaggcagctctggacaagggagcaggcagtccagagaactggcctccccagcccactgccacaggctgtgcttctaggactgtgggcccctgtgtggcccatgaagttgtgaagtcaaataaattaattttatctttaaaaaaaaaaaaaaaaaayyggggggtttttttggggg

SEQ ID NO: 1324 - DNA, 7296 bp, Homo sapiens
gtcctggctataagtcaccatggcacagcaagctgccgataagtatctctatgtggataaaaacttcatcaacaatccgctggcccaggccgactgggctgccaagaagctggtatgggtgccttccgacaagagtggctttgagccagccagcctcaaggaggaggtgggcgaagaggccatcgtggagctggtggagaatgggaagaaggtgaaggtgaacaaggatgacatccagaagatgaacccgcccaagttctccaaggtggaggacatggcagagctcacgtgcctcaacgaagcctcggtgctgcacaacctcaaggagcgttactactcagggctcatctacacctattcaggcctgttctgtgtggtcatcaatccttacaagaacctgcccatctactctgaagagattgtggaaatgtacaagggcaagaagaggcacgagatgccccctcacatctatgccatcacagacaccgcctacaggagtatgatgcaagaccgagaagatcaatccatcttgtgcactggtgaatctggagctggcaagacggagaacaccaagaaggtcatccagtatctggcgtacgtggcgtcctcgcacaagagcaagaaggaccagggcgagctggagcggcagctgctgcaggccaaccccatcctggaggccttcgggaacgccaagaccgtgaagaatgacaactcctcccgcttcggcaaattcattcgcatcaactttgatgtcaatggctacattgttggagccaacattgagacttatcttttggagaaatctcgtgctatccgccaagccaaggaagaacggaccttccacatcttctattatctcctgtctggggctggagagcacctgaagaccgatctcctgttggagccgtacaacaaataccgcttcctgtccaatggacacgtcaccatccccgggcagcaggacaaggacatgttccaggagaccatggaggccatgaggattatgggcatcccagaagaggagcaaatgggcctgctgcgggtcatctcaggggttcttcagctcggcaacatcgtcttcaagaaggagcggaacactgaccaggcgtccatgcccgacaacacagctgcccaaaaggtgtcccatctcttgggtatcaatgtgaccgatttcaccagaggaatcctcaccccgcgcatcaaggtgggacgggattacgtccagaaggcgcagactaaagagcaggctgactttgccatcgaggccttggccaaggcgacctatgagcggatgttccgctggctggtgctgcgcatcaacaaggctctggacaagaccaagaggcagggcgcctccttcatcgggatcctggacattgccggcttcgagatctttgatctgaactcgtttgagcagctgtgcatcaattacaccaatgagaagctgcagcagctcttcaaccacaccatgttcatcctggagcaggaggagtaccagcgcgagggcatcgagtggaacttcatcgactttggcctcgacctgcagccctgcatcgacctcattgagaagccagcaggccccccgggcattctggccctgctggacgaggagtgctggttccccaaagccaccgacaagagcttcgtggagaaggtgatgcaggagcagggcacccaccccaagttccagaagcccaagcagctgaaggacaaagctgatttctgcattatccactatgccggcaaggtggattacaaagctgacgagtggctgatgaagaacatggatcccctgaatgacaacatcgccacactgctccaccagtcctctgacaagtttgtctcggagctgtggaaggatgtggaccgcatcatcggcctggaccaggtggccggcatgtcggagaccgcactgcccggggccttcaagacgcggaagggcatgttccgcactgtggggcagctttacaaggagcagctggccaagctgatggctacgctgaggaacacgaaccccaactttgtccgctgcatcatccccaaccacgagaagaaggccggcaagctggacccgcatctcgtgctggaccagctgcgctgcaacggtgttctcgagggcatccgtatctgccgccagggcttccccaacagggtggtcttccaggagtttcggcagagatatgagatcctgactccaaactccattcccaagggtttcatggacgggaagcaggcgtgcgtgctcatgataaaagccctggagctcgacagcaatctgtaccgcattggccagagcaaagtcttcttccgtgccggtgtgctggcccacctggaggaggagcgagacctgaagatcaccgacgtcatcatagggttccaggcctgctgcaggggctacctggccaggaaagcatttgccaagcggcagcagcagcttaccgccatgaaggtcctccagcggaactgcgctgcctacctgaagctgcggaactggcagtggtggcggctcttcaccaaggtcaagccgctgctgcaggtgagccggcaggaggaggagatgatggccaaggaggaggagctggtgaaggtcagagagaagcagctggctgcggagaacaggctcacggagatggagacgctgcagtctcagctcatggcagagaaattgcagctgcaggagcagctccaggcagaaaccgagctgtgtgccgaggctgaggagctccgggcccgcctgaccgccaagaagcaggaattagaagagatctgccatgacctagaggccagggtggaggaggaggaggagcgctgccagcacctgcaggcggagaagaagaagatgcagcagaacatccaggagcttgaggagcagctggaggaggaggagagcgcccggcagaagctgcagctggagaaggtgaccaccgaggcgaagctgaaaaagctggaggaggagcagatcatcctggaggaccagaactgcaagctggccaaggaaaagaaactgctggaagacagaatagctgagttcaccaccaacctcacagaagaggaggagaaatctaagagcctcgccaagctcaagaacaagcatgaggcaatgatcactgacttggaagagcgcctccgcagggaggagaagcagcgacaggagctggagaagacccgccggaagctggagggagactccacagacctcagcgaccagatcgccgagctccaggcccagatcgcggagctcaagatgcagctggccaagaaagaggaggagctccaggccgccctggccagagtggaagaggaagctgcccagaagaacatggccctcaagaagatccgggagctggaatctcagatctctgaactccaggaagacctggagtctgagcgtgcttccaggaataaagctgagaagcagaaacgggaccttggggaagagctagaggcgctgaaaacagagttggaggacacgctggattccacagctgcccagcaggagctcaggtcaaaacgtgagcaggaggtgaacatcctgaagaagaccctggaggaggaggccaagacccacgaggcccagatccaggagatgaggcagaagcactcacaggccgtggaggagctggcggagcagctggagcagacgaagcgggtgaaagcaaacctcgagaaggcaaagcagactctggagaacgagcggggggagctggccaacgaggtgaaggtgctgctgcagggcaaaggggactcggagcacaagcgcaagaaagtggaggcgcagctgcaggagctgcaggtcaagttcaacgagggagagcgcgtgcgcacagagctggccgacaaggtcaccaagctgcaggtggagctggacaacgtgaccgggcttctcagccagtccgacagcaagtccagcaagctcaccaaggacttctccgcgctggagtcccagctgcaggacactcaggagctgctgcaggaggagaaccggcagaagctgagcctgagcaccaagctcaagcaggtggaggacgagaagaattccttccgggagcagctggaggaggaggaggaggccaagcacaacctggagaagcagatcgccaccctccatgcccaggtggccgacatgaaaaagaagatggaggacagtgtggggtgcctggaaactgctgaggaggtgaagaggaagctccagaaggacctggagggcctgagccagcggcacgaggagaaggtggccgcctacgacaagctggagaagaccaagacgcggctgcagcaggagctggacgacctgctggtggacctggaccaccagcgccagagcgcgtgcaacctggagaagaagcagaagaagtttgaccagctcctggcggaggagaagaccatctctgccaagtatgcagaggagcgcgaccgggctgaggcggaggcccgagagaaggagaccaaggctctgtcgctggcccgggccctggaggaagccatggagcagaaggcggagctggagcggctcaacaagcagttccgcacggagatggaggaccttatgagctccaaggatgatgtgggcaagagtgtccacgagctggagaagtccaagcgggccctagagcagcaggtggaggagatgaagacgcagctggaagagctggaggacgagctgcaggccaccgaagatgccaagctgcggttggaggtcaacctgcaggccatgaaggcccagttcgagcgggacctgcagggccgggacgagcagagcgaggagaagaagaagcagctggtcagacaggtgcgggagatggaggcagagctggaggacgagaggaagcagcgctcgatggcagtggccgcccggaagaagctggagatggacctgaaggacctggaggcgcacatcgactcggccaacaagaaccgggacgaagccatcaaacagctgcggaagctgcaggcccagatgaaggactgcatgcgcgagctggatgacacccgcgcctctcgtgaggagatcctggcccaggccaaagagaacgagaagaagctgaagagcatggaggccgagatgatccagttgcaggaggaactggcagccgcggagcgtgccaagcgccaggcccagcaggagcgggatgagctggctgacgagatcgccaacagcagcggcaaaggagccctggcgttagaggagaagcggcgtctggaggcccgcatcgcccagctggaggaggagctggaggaggagcagggcaacacggagctgatcaacgaccggctgaagaaggccaacctgcagatcgaccagatcaacaccgacctgaacctggagcgcagccacgcccagaagaacgagaatgctcggcagcagctggaacgccagaacaaggagcttaaggtcaagctgcaggagatggagggcactgtcaagtccaagtacaaggcctccatcaccgccctcgaggccaagattgcacagctggaggagcagctggacaacgagaccaaggagcgccaggcagcctgcaaacaggtgcgtcggaccgagaagaagctgaaggatgtgctgctgcaggtggatgacgagcggaggaacgccgagcagtacaaggaccaggccgacaaggcatctacccgcctgaagcagctcaagcggcagctggaggaggccgaagaggaggcccagcgggccaacgcctcccgccggaaactgcagcgcgagctggaggacgccactgagacggccgatgccatgaaccgcgaagtcagctccctaaagaacaagctcaggcgcggggacctgccgtttgtcgtgccccgccgaatggcccggaaaggcgccggggatggctccgacgaagaggtagatggcaaagcggatggggctgaggccaaacctgccgaataagcctcttctcctgcagcctgagatggatggacagacagacaccacagcctccccttcccagaccccgcagcacgcctctccccaccttcttgggactgctgtgaacatgcctcctcctgccctccgccccgtccccccatcccgtttccctccaggtgttgttgagggcatttggcttcctctgctgcatccccttccagctccctcccctgctcagaatctgataccaaagagacatggcccgggcccaggcagagagccaccagcaggctcctcagccctctcttgccaaaaagcacaagatgttgaggcgagcagggcaggcccccggggaggggccagagttttctatgaatctatttttcttcagactgaggccttttggtagtcggagcccccgcagtcgtcagcctccctgacgtctgccaccagcgcccccactcctcctcctttctttgctgtttgcaatcacacgtggtgacctcacacacctctgccccttgggcctcccactcccatggctctgggcggtccagaaggagcaggccctgggcctccacctctgtgcagggcacagaaggctggggtggggggaggagtggattcctccccaccctgtcccaggcagcgccactgtccgctgtctccctcctgattctaaaatgtctcaagtgcaatgccccctcccctcctttaccgaggacagcctgcctctgccacagcaaggctgtcggggtcaagctggaaaggccagcagccttccagtggcttctcccaacactcttggggaccaaatatacttaatggttaagggacttgtcccaagtctgacagccagagcgttagaggggccagcggccctcccaggcgatcttgtgtctactctaggactgggcccgagggtggtttacctgcaccgttgactcagtatagtttaaaaatctgccacctgcacaggtatttttgaaagcaaaataaggttttcttttttcccctttcttgtaataaatgataaaattccgagtctttctcactgcctttgtttagaagagagtagctcgtcctcactggtctacactggttgccgaatttacttgtattcctaactgttttgtatatgctgcattgagacttacggcaagaaggcattttttttttttaaaggaaacaaactctcaaatcatgaagtgatataaaagctgcatatgcctacaaagctctgaattcaggtcccagttgctgtcacaaaggagtgagtgaaactcccaccctacccccttttttatataataaaagtgccttagcatgtgttgcagctgtcaccactacagtaagctggtttacagatgttttccactgagcatcacaataaagagaaccatgtgctacgagcc

SEQ ID NO: 1325 - DNA, 7234 bp, Homo sapiens
cgcggttcctgggcagggcacggaaggctaagcaaggctgacctgctgcagctcccgcctcgtgcgctcgccccacccggccgccgcccgagcgctcgagaaagtcctctcgggagaagcagcgcctgttcccggggcagatccaggttcaggtcctggctataagtcaccatggcacagcaagctgccgataagtatctctatgtggataaaaacttcatcaacaatccgctggcccaggccgactgggctgccaagaagctggtatgggtgccttccgacaagagtggctttgagccagccagcctcaaggaggaggtgggcgaagaggccatcgtggagctggtggagaatgggaagaaggtgaaggtgaacaaggatgacatccagaagatgaacccgcccaagttctccaaggtggaggacatggcagagctcacgtgcctcaacgaagcctcggtgctgcacaacctcaaggagcgttactactcagggctcatctacacctattcaggcctgttctgtgtggtcatcaatccttacaagaacctgcccatctactctgaagagattgtggaaatgtacaagggcaagaagaggcacgagatgccccctcacatctatgccatcacagacaccgcctacaggagtatgatgcaagaccgagaagatcaatccatcttgtgcactggtgaatctggagctggcaagacggagaacaccaagaaggtcatccagtatctggcgtacgtggcgtcctcgcacaagagcaagaaggaccagggcgagctggagcggcagctgctgcaggccaaccccatcctggaggccttcgggaacgccaagaccgtgaagaatgacaactcctcccgcttcggcaaattcattcgcatcaactttgatgtcaatggctacattgttggagccaacattgagacttatcttttggagaaatctcgtgctatccgccaagccaaggaagaacggaccttccacatcttctattatctcctgtctggggctggagagcacctgaagaccgatctcctgttggagccgtacaacaaataccgcttcctgtccaatggacacgtcaccatccccgggcagcaggacaaggacatgttccaggagaccatggaggccatgaggattatgggcatcccagaagaggagcaaatgggcctgctgcgggtcatctcaggggttcttcagctcggcaacatcgtcttcaagaaggagcggaacactgaccaggcgtccatgcccgacaacacagctgcccaaaaggtgtcccatctcttgggtatcaatgtgaccgatttcaccagaggaatcctcaccccgcgcatcaaggtgggacgggattacgtccagaaggcgcagactaaagagcaggctgactttgccatcgaggccttggccaaggcgacctatgagcggatgttccgctggctggtgctgcgcatcaacaaggctctggacaagaccaagaggcagggcgcctccttcatcgggatcctggacattgccggcttcgagatctttgatctgaactcgtttgagcagctgtgcatcaattacaccaatgagaagctgcagcagctcttcaaccacaccatgttcatcctggagcaggaggagtaccagcgcgagggcatcgagtggaacttcatcgactttggcctcgacctgcagccctgcatcgacctcattgagaagccagcaggccccccgggcattctggccctgctggacgaggagtgctggttccccaaagccaccgacaagagcttcgtggagaaggtgatgcaggagcagggcacccaccccaagttccagaagcccaagcagctgaaggacaaagctgatttctgcattatccactatgccggcaaggtggattacaaagctgacgagtggctgatgaagaacatggatcccctgaatgacaacatcgccacactgctccaccagtcctctgacaagtttgtctcggagctgtggaaggatgtggaccgcatcatcggcctggaccaggtggccggcatgtcggagaccgcactgcccggggccttcaagacgcggaagggcatgttccgcactgtggggcagctttacaaggagcagctggccaagctgatggctacgctgaggaacacgaaccccaactttgtccgctgcatcatccccaaccacgagaagaaggccggcaagctggacccgcatctcgtgctggaccagctgcgctgcaacggtgttctcgagggcatccgtatctgccgccagggcttccccaacagggtggtcttccaggagtttcggcagagatatgagatcctgactccaaactccattcccaagggtttcatggacgggaagcaggcgtgcgtgctcatgataaaagccctggagctcgacagcaatctgtaccgcattggccagagcaaagtcttcttccgtgccggtgtgctggcccacctggaggaggagcgagacctgaagatcaccgacgtcatcatagggttccaggcctgctgcaggggctacctggccaggaaagcatttgccaagcggcagcagcagcttaccgccatgaaggtcctccagcggaactgcgctgcctacctgaagctgcggaactggcagtggtggcggctcttcaccaaggtcaagccgctgctgcaggtgagccggcaggaggaggagatgatggccaaggaggaggagctggtgaaggtcagagagaagcagctggctgcggagaacaggctcacggagatggagacgctgcagtctcagctcatggcagagaaattgcagctgcaggagcagctccaggcagaaaccgagctgtgtgccgaggctgaggagctccgggcccgcctgaccgccaagaagcaggaattagaagagatctgccatgacctagaggccagggtggaggaggaggaggagcgctgccagcacctgcaggcggagaagaagaagatgcagcagaacatccaggagcttgaggagcagctggaggaggaggagagcgcccggcagaagctgcagctggagaaggtgaccaccgaggcgaagctgaaaaagctggaggaggagcagatcatcctggaggaccagaactgcaagctggccaaggaaaagaaactgctggaagacagaatagctgagttcaccaccaacctcacagaagaggaggagaaatctaagagcctcgccaagctcaagaacaagcatgaggcaatgatcactgacttggaagagcgcctccgcagggaggagaagcagcgacaggagctggagaagacccgccggaagctggagggagactccacagacctcagcgaccagatcgccgagctccaggcccagatcgcggagctcaagatgcagctggccaagaaagaggaggagctccaggccgccctggccagagtggaagaggaagctgcccagaagaacatggccctcaagaagatccgggagctggaatctcagatctctgaactccaggaagacctggagtctgagcgtgcttccaggaataaagctgagaagcagaaacgggaccttggggaagagctagaggcgctgaaaacagagttggaggacacgctggattccacagctgcccagcaggagctcaggtcaaaacgtgagcaggaggtgaacatcctgaagaagaccctggaggaggaggccaagacccacgaggcccagatccaggagatgaggcagaagcactcacaggccgtggaggagctggcggagcagctggagcagacgaagcgggtgaaagcaaacctcgagaaggcaaagcagactctggagaacgagcggggggagctggccaacgaggtgaaggtgctgctgcagggcaaaggggactcggagcacaagcgcaagaaagtggaggcgcagctgcaggagctgcaggtcaagttcaacgagggagagcgcgtgcgcacagagctggccgacaaggtcaccaagctgcaggtggagctggacaacgtgaccgggcttctcagccagtccgacagcaagtccagcaagctcaccaaggacttctccgcgctggagtcccagctgcaggacactcaggagctgctgcaggaggagaaccggcagaagctgagcctgagcaccaagctcaagcaggtggaggacgagaagaattccttccgggagcagctggaggaggaggaggaggccaagcacaacctggagaagcagatcgccaccctccatgcccaggtggccgacatgaaaaagaagatggaggacagtgtggggtgcctggaaactgctgaggaggtgaagaggaagctccagaaggacctggagggcctgagccagcggcacgaggagaaggtggccgcctacgacaagctggagaagaccaagacgcggctgcagcaggagctggacgacctgctggtggacctggaccaccagcgccagagcgcgtgcaacctggagaagaagcagaagaagtttgaccagctcctggcggaggagaagaccatctctgccaagtatgcagaggagcgcgaccgggctgaggcggaggcccgagagaaggagaccaaggctctgtcgctggcccgggccctggaggaagccatggagcagaaggcggagctggagcggctcaacaagcagttccgcacggagatggaggaccttatgagctccaaggatgatgtgggcaagagtgtccacgagctggagaagtccaagcgggccctagagcagcaggtggaggagatgaagacgcagctggaagagctggaggacgagctgcaggccaccgaagatgccaagctgcggttggaggtcaacctgcaggccatgaaggcccagttcgagcgggacctgcagggccgggacgagcagagcgaggagaagaagaagcagctggtcagacaggtgcgggagatggaggcagagctggaggacgagaggaagcagcgctcgatggcagtggccgcccggaagaagctggagatggacctgaaggacctggaggcgcacatcgactcggccaacaagaaccgggacgaagccatcaaacagctgcggaagctgcaggcccagatgaaggactgcatgcgcgagctggatgacacccgcgcctctcgtgaggagatcctggcccaggccaaagagaacgagaagaagctgaagagcatggaggccgagatgatccagttgcaggaggaactggcagccgcggagcgtgccaagcgccaggcccagcaggagcgggatgagctggctgacgagatcgccaacagcagcggcaaaggagccctggcgttagaggagaagcggcgtctggaggcccgcatcgcccagctggaggaggagctggaggaggagcagggcaacacggagctgatcaacgaccggctgaagaaggccaacctgcagatcgaccagatcaacaccgacctgaacctggagcgcagccacgcccagaagaacgagaatgctcggcagcagctggaacgccagaacaaggagcttaaggtcaagctgcaggagatggagggcactgtcaagtccaagtacaaggcctccatcaccgccctcgaggccaagattgcacagctggaggagcagctggacaacgagaccaaggagcgccaggcagcctgcaaacaggtgcgtcggaccgagaagaagctgaaggatgtgctgctgcaggtggatgacgagcggaggaacgccgagcagtacaaggaccaggccgacaaggcatctacccgcctgaagcagctcaagcggcagctggaggaggccgaagaggaggcccagcgggccaacgcctcccgccggaaactgcagcgcgagctggaggacgccactgagacggccgatgccatgaaccgcgaagtcagctccctaaagaacaagctcaggcgcggggacctgccgtttgtcgtgccccgccgaatggcccggaaaggcgccggggatggctccgacgaagaggtagatggcaaagcggatggggctgaggccaaacctgccgaataagcctcttctcctgcagcctgagatggatggacagacagacaccacagcctccccttcccagaccccgcagcacgcctctccccaccttcttgggactgctgtgaacatgcctcctcctgccctccgccccgtccccccatcccgtttccctccaggtgttgttgagggcatttggcttcctctgctgcatccccttccagctccctcccctgctcagaatctgataccaaagagacatggcccgggcccaggcagagagccaccagcaggctcctcagtgacctcacacacctctgccccttgggcctcccactcccatggctctgggcggtccagaaggagcaggccctgggcctccacctctgtgcagggcacagaaggctggggtggggggaggagtggattcctccccaccctgtcccaggcagcgccactgtccgctgtctccctcctgattctaaaatgtctcaagtgcaatgccccctcccctcctttaccgaggacagcctgcctctgccacagcaaggctgtcggggtcaagctggaaaggccagcagccttccagtggcttctcccaacactcttggggaccaaatatacttaatggttaagggacttgtcccaagtctgacagccagagcgttagaggggccagcggccctcccaggcgatcttgtgtctactctaggactgggcccgagggtggtttacctgcaccgttgactcagtatagtttaaaaatctgccacctgcacaggtatttttgaaagcaaaataaggttttcttttttcccctttcttgtaataaatgataaaattccgagtctttctcactgcctttgtttagaagagagtagctcgtcctcactggtctacactggttgccgaatttacttgtattcctaactgttttgtatatgctgcattgagacttacggcaagaaggcattttttttttttaaaggaaacaaactctcaaatcatgaagtgatataaaagctgcatatgcctacaaagctctgaattcaggtcccagttgctgtcacaaaggagtgagtgaaactcccaccctacccccttttttatataataaaagtgccttagcatgtgttgcagctgtcaccactacagtaagctggtttacagatgttttccactgagcatcacaataaagagaacc

SEQ ID NO: 1326 - DNA, 7448 bp, Homo sapiens
cgcggttcctgggcagggcacggaaggctaagcaaggctgacctgctgcagctcccgcctcgtgcgctcgccccacccggccgccgcccgagcgctcgagaaagtcctctcgggagaagcagcgcctgttcccggggcagatccaggttcaggtcctggctataagtcaccatggcacagcaagctgccgataagtatctctatgtggataaaaacttcatcaacaatccgctggcccaggccgactgggctgccaagaagctggtatgggtgccttccgacaagagtggctttgagccagccagcctcaaggaggaggtgggcgaagaggccatcgtggagctggtggagaatgggaagaaggtgaaggtgaacaaggatgacatccagaagatgaacccgcccaagttctccaaggtggaggacatggcagagctcacgtgcctcaacgaagcctcggtgctgcacaacctcaaggagcgttactactcagggctcatctacacctattcaggcctgttctgtgtggtcatcaatccttacaagaacctgcccatctactctgaagagattgtggaaatgtacaagggcaagaagaggcacgagatgccccctcacatctatgccatcacagacaccgcctacaggagtatgatgcaagaccgagaagatcaatccatcttgtgcactggtgaatctggagctggcaagacggagaacaccaagaaggtcatccagtatctggcgtacgtggcgtcctcgcacaagagcaagaaggaccagggcgagctggagcggcagctgctgcaggccaaccccatcctggaggccttcgggaacgccaagaccgtgaagaatgacaactcctcccgcttcggcaaattcattcgcatcaactttgatgtcaatggctacattgttggagccaacattgagacttatcttttggagaaatctcgtgctatccgccaagccaaggaagaacggaccttccacatcttctattatctcctgtctggggctggagagcacctgaagaccgatctcctgttggagccgtacaacaaataccgcttcctgtccaatggacacgtcaccatccccgggcagcaggacaaggacatgttccaggagaccatggaggccatgaggattatgggcatcccagaagaggagcaaatgggcctgctgcgggtcatctcaggggttcttcagctcggcaacatcgtcttcaagaaggagcggaacactgaccaggcgtccatgcccgacaacacagctgcccaaaaggtgtcccatctcttgggtatcaatgtgaccgatttcaccagaggaatcctcaccccgcgcatcaaggtgggacgggattacgtccagaaggcgcagactaaagagcaggctgactttgccatcgaggccttggccaaggcgacctatgagcggatgttccgctggctggtgctgcgcatcaacaaggctctggacaagaccaagaggcagggcgcctccttcatcgggatcctggacattgccggcttcgagatctttgatctgaactcgtttgagcagctgtgcatcaattacaccaatgagaagctgcagcagctcttcaaccacaccatgttcatcctggagcaggaggagtaccagcgcgagggcatcgagtggaacttcatcgactttggcctcgacctgcagccctgcatcgacctcattgagaagccagcaggccccccgggcattctggccctgctggacgaggagtgctggttccccaaagccaccgacaagagcttcgtggagaaggtgatgcaggagcagggcacccaccccaagttccagaagcccaagcagctgaaggacaaagctgatttctgcattatccactatgccggcaaggtggattacaaagctgacgagtggctgatgaagaacatggatcccctgaatgacaacatcgccacactgctccaccagtcctctgacaagtttgtctcggagctgtggaaggatgtggaccgcatcatcggcctggaccaggtggccggcatgtcggagaccgcactgcccggggccttcaagacgcggaagggcatgttccgcactgtggggcagctttacaaggagcagctggccaagctgatggctacgctgaggaacacgaaccccaactttgtccgctgcatcatccccaaccacgagaagaaggccggcaagctggacccgcatctcgtgctggaccagctgcgctgcaacggtgttctcgagggcatccgtatctgccgccagggcttccccaacagggtggtcttccaggagtttcggcagagatatgagatcctgactccaaactccattcccaagggtttcatggacgggaagcaggcgtgcgtgctcatgataaaagccctggagctcgacagcaatctgtaccgcattggccagagcaaagtcttcttccgtgccggtgtgctggcccacctggaggaggagcgagacctgaagatcaccgacgtcatcatagggttccaggcctgctgcaggggctacctggccaggaaagcatttgccaagcggcagcagcagcttaccgccatgaaggtcctccagcggaactgcgctgcctacctgaagctgcggaactggcagtggtggcggctcttcaccaaggtcaagccgctgctgcaggtgagccggcaggaggaggagatgatggccaaggaggaggagctggtgaaggtcagagagaagcagctggctgcggagaacaggctcacggagatggagacgctgcagtctcagctcatggcagagaaattgcagctgcaggagcagctccaggcagaaaccgagctgtgtgccgaggctgaggagctccgggcccgcctgaccgccaagaagcaggaattagaagagatctgccatgacctagaggccagggtggaggaggaggaggagcgctgccagcacctgcaggcggagaagaagaagatgcagcagaacatccaggagcttgaggagcagctggaggaggaggagagcgcccggcagaagctgcagctggagaaggtgaccaccgaggcgaagctgaaaaagctggaggaggagcagatcatcctggaggaccagaactgcaagctggccaaggaaaagaaactgctggaagacagaatagctgagttcaccaccaacctcacagaagaggaggagaaatctaagagcctcgccaagctcaagaacaagcatgaggcaatgatcactgacttggaagagcgcctccgcagggaggagaagcagcgacaggagctggagaagacccgccggaagctggagggagactccacagacctcagcgaccagatcgccgagctccaggcccagatcgcggagctcaagatgcagctggccaagaaagaggaggagctccaggccgccctggccagagtggaagaggaagctgcccagaagaacatggccctcaagaagatccgggagctggaatctcagatctctgaactccaggaagacctggagtctgagcgtgcttccaggaataaagctgagaagcagaaacgggaccttggggaagagctagaggcgctgaaaacagagttggaggacacgctggattccacagctgcccagcaggagctcaggtcaaaacgtgagcaggaggtgaacatcctgaagaagaccctggaggaggaggccaagacccacgaggcccagatccaggagatgaggcagaagcactcacaggccgtggaggagctggcggagcagctggagcagacgaagcgggtgaaagcaaacctcgagaaggcaaagcagactctggagaacgagcggggggagctggccaacgaggtgaaggtgctgctgcagggcaaaggggactcggagcacaagcgcaagaaagtggaggcgcagctgcaggagctgcaggtcaagttcaacgagggagagcgcgtgcgcacagagctggccgacaaggtcaccaagctgcaggtggagctggacaacgtgaccgggcttctcagccagtccgacagcaagtccagcaagctcaccaaggacttctccgcgctggagtcccagctgcaggacactcaggagctgctgcaggaggagaaccggcagaagctgagcctgagcaccaagctcaagcaggtggaggacgagaagaattccttccgggagcagctggaggaggaggaggaggccaagcacaacctggagaagcagatcgccaccctccatgcccaggtggccgacatgaaaaagaagatggaggacagtgtggggtgcctggaaactgctgaggaggtgaagaggaagctccagaaggacctggagggcctgagccagcggcacgaggagaaggtggccgcctacgacaagctggagaagaccaagacgcggctgcagcaggagctggacgacctgctggtggacctggaccaccagcgccagagcgcgtgcaacctggagaagaagcagaagaagtttgaccagctcctggcggaggagaagaccatctctgccaagtatgcagaggagcgcgaccgggctgaggcggaggcccgagagaaggagaccaaggctctgtcgctggcccgggccctggaggaagccatggagcagaaggcggagctggagcggctcaacaagcagttccgcacggagatggaggaccttatgagctccaaggatgatgtgggcaagagtgtccacgagctggagaagtccaagcgggccctagagcagcaggtggaggagatgaagacgcagctggaagagctggaggacgagctgcaggccaccgaagatgccaagctgcggttggaggtcaacctgcaggccatgaaggcccagttcgagcgggacctgcagggccgggacgagcagagcgaggagaagaagaagcagctggtcagacaggtgcgggagatggaggcagagctggaggacgagaggaagcagcgctcgatggcagtggccgcccggaagaagctggagatggacctgaaggacctggaggcgcacatcgactcggccaacaagaaccgggacgaagccatcaaacagctgcggaagctgcaggcccagatgaaggactgcatgcgcgagctggatgacacccgcgcctctcgtgaggagatcctggcccaggccaaagagaacgagaagaagctgaagagcatggaggccgagatgatccagttgcaggaggaactggcagccgcggagcgtgccaagcgccaggcccagcaggagcgggatgagctggctgacgagatcgccaacagcagcggcaaaggagccctggcgttagaggagaagcggcgtctggaggcccgcatcgcccagctggaggaggagctggaggaggagcagggcaacacggagctgatcaacgaccggctgaagaaggccaacctgcagatcgaccagatcaacaccgacctgaacctggagcgcagccacgcccagaagaacgagaatgctcggcagcagctggaacgccagaacaaggagcttaaggtcaagctgcaggagatggagggcactgtcaagtccaagtacaaggcctccatcaccgccctcgaggccaagattgcacagctggaggagcagctggacaacgagaccaaggagcgccaggcagcctgcaaacaggtgcgtcggaccgagaagaagctgaaggatgtgctgctgcaggtggatgacgagcggaggaacgccgagcagtacaaggaccaggccgacaaggcatctacccgcctgaagcagctcaagcggcagctggaggaggccgaagaggaggcccagcgggccaacgcctcccgccggaaactgcagcgcgagctggaggacgccactgagacggccgatgccatgaaccgcgaagtcagctccctaaagaacaagctcaggcgcggggacctgccgtttgtcgtgccccgccgaatggcccggaaaggcgccggggatggctccgacgaagaggtagatggcaaagcggatggggctgaggccaaacctgccgaataagcctcttctcctgcagcctgagatggatggacagacagacaccacagcctccccttcccagaccccgcagcacgcctctccccaccttcttgggactgctgtgaacatgcctcctcctgccctccgccccgtccccccatcccgtttccctccaggtgttgttgagggcatttggcttcctctgctgcatccccttccagctccctcccctgctcagaatctgataccaaagagacatggcccgggcccaggcagagagccaccagcaggctcctcagccctctcttgccaaaaagcacaagatgttgaggcgagcagggcaggcccccggggaggggccagagttttctatgaatctatttttcttcagactgaggccttttggtagtcggagcccccgcagtcgtcagcctccctgacgtctgccaccagcgcccccactcctcctcctttctttgctgtttgcaatcacacgtggtgacctcacacacctctgccccttgggcctcccactcccatggctctgggcggtccagaaggagcaggccctgggcctccacctctgtgcagggcacagaaggctggggtggggggaggagtggattcctccccaccctgtcccaggcagcgccactgtccgctgtctccctcctgattctaaaatgtctcaagtgcaatgccccctcccctcctttaccgaggacagcctgcctctgccacagcaaggctgtcggggtcaagctggaaaggccagcagccttccagtggcttctcccaacactcttggggaccaaatatacttaatggttaagggacttgtcccaagtctgacagccagagcgttagaggggccagcggccctcccaggcgatcttgtgtctactctaggactgggcccgagggtggtttacctgcaccgttgactcagtatagtttaaaaatctgccacctgcacaggtatttttgaaagcaaaataaggttttcttttttcccctttcttgtaataaatgataaaattccgagtctttctcactgcctttgtttagaagagagtagctcgtcctcactggtctacactggttgccgaatttacttgtattcctaactgttttgtatatgctgcattgagacttacggcaagaaggcattttttttttttaaaggaaacaaactctcaaatcatgaagtgatataaaagctgcatatgcctacaaagctctgaattcaggtcccagttgctgtcacaaaggagtgagtgaaactcccaccctacccccttttttatataataaaagtgccttagcatgtgttgcagctgtcaccactacagtaagctggtttacagatgttttccactgagcatcacaataaagagaaccatgtgctacgagcc

SEQ ID NO: 1327 - DNA, 920 bp, Homo sapiens
gcacggaggggcagagaccccggagccccagccccaccatgaccctcggccgccgactcgcgtgtcttttcctcgcctgtgtcctgccggccttgctgctggggggcaccgcgctggcctcggagattgtggggggccggcgagcgcggccccacgcgtggcccttcatggtgtccctgcagctgcgcggaggccacttctgcggcgccaccctgattgcgcccaacttcgtcatgtcggccgcgcactgcgtggcgaatgtaaacgtccgcgcggtgcgggtggtcctgggagcccataacctctcgcggcgggagcccacccggcaggtgttcgccgtgcagcgcatcttcgaaaacggctacgaccccgtaaacttgctcaacgacatcgtgattctccagctcaacgggtcggccaccatcaacgccaacgtgcaggtggcccagctgccggctcagggacgccgcctgggcaacggggtgcagtgcctggccatgggctggggccttctgggcaggaaccgtgggatcgccagcgtcctgcaggagctcaacgtgacggtggtgacgtccctctgccgtcgcagcaacgtctgcactctcgtgaggggccggcaggccggcgtctgtttcggggactccggcagccccttggtctgcaacgggctaatccacggaattgcctccttcgtccggggaggctgcgcctcagggctctaccccgatgcctttgccccggtggcacagtttgtaaactggatcgactctatcatccaacgctccgaggacaacccctgtccccacccccgggacccggacccggccagcaggacccactgagaagggctgcccgggtcacctcagctgcccacacccacactctccagcatctggcacaataaacattctctgttttgt

SEQ ID NO: 1328 - DNA, 985 bp, Homo sapiens
gcgctggccggccgtggggcaatgcaacggcctcccagcacagggctataagaggagccgggcgggcacggaggggcagagaccccggagccccagccccaccatgaccctcggccgccgactcgcgtgtcttttcctcgcctgtgtcctgccggccttgctgctggggggcaccgcgctggcctcggagattgtggggggccggcgagcgcggccccacgcgtggcccttcatggtgtccctgcagctgcgcggaggccacttctgcggcgccaccctgattgcgcccaacttcgtcatgtcggccgcgcactgcgtggcgaatgtaaacgtccgcgcggtgcgggtggtcctgggagcccataacctctcgcggcgggagcccacccggcaggtgttcgccgtgcagcgcatcttcgaaaacggctacgaccccgtaaacttgctcaacgacatcgtgattctccagctcaacgggtcggccaccatcaacgccaacgtgcaggtggcccagctgccggctcagggacgccgcctgggcaacggggtgcagtgcctggccatgggctggggccttctgggcaggaaccgtgggatcgccagcgtcctgcaggagctcaacgtgacggtggtgacgtccctctgccgtcgcagcaacgtctgcactctcgtgaggggccggcaggccggcgtctgtttcggggactccggcagccccttggtctgcaacgggctaatccacggaattgcctccttcgtccggggaggctgcgcctcagggctctaccccgatgcctttgccccggtggcacagtttgtaaactggatcgactctatcatccaacgctccgaggacaacccctgtccccacccccgggacccggacccggccagcaggacccactgagaagggctgcccgggtcacctcagctgcccacacccacactctccagcatctggcacaataaacattctctgttttgt

SEQ ID NO: 1329 - DNA, 1956 bp, Homo sapiens
gaagtagggcgtgtggcgtcacttccggcttccttcagtccgctggtcccgagcacgagctgtgaggggattcacttgtgtgcggaactcctcggaaccatggcgtccctttcccttgcacctgttaacatctttaaggcaggagctgatgaagagagagcagagacagctcgtctgacttcttttattggtgccatcgccattggagacttggtaaagagcaccttgggacccaaaggcatggacaaaattcttctaagcagtggacgagatgcctctcttatggtaaccaatgatggtgccactattctaaaaaacattggtgttgacaatccagcagctaaagttttagttgatatgtcaagggttcaagatgatgaagttggtgatggcactacctctgttaccgttttagcagcagaattattaagggaagcagaatctttaattgcaaaaaagattcatccacagaccatcatagcgggttggagagaagccacgaaggctgcaagagaggcgctgttgagttctgcagttgatcatggttccgatgaagttaaattccgtcaagatttaatgaatattgcgggcacaacattatcctcaaaacttcttactcatcacaaagaccactttacaaagttagctgtagaagcagttctcagactgaaaggctctggcaacctggaggcaattcatattatcaagaagctaggaggaagtttggcagattcctatttagatgaaggcttcctgttggataaaaaaattggagtaaatcaaccaaaacgaattgaaaatgctaaaattcttattgcaaatactggtatggatacagacaaaataaagatatttggttcccgggtaagagttgactctacagcaaaggttgcagaaatagaacatgcggaaaaggaaaaaatgaaggagaaagttgaacgtattcttaagcatggaataaattgctttattaacaggcaattaatttataattatcctgaacagctctttggtgctgctggtgtcatggctattgagcatgcagattttgcaggtgtggaacgcctagctcttgtcacaggtggtgaaattgcctctacctttgatcacccagaactggtgaagcttggaagttgcaaacttatcgaggaagtcatgattggagaagacaaactcattcacttttctggggttgcccttggtgaggcttgtaccattgttttgcgtggtgccactcaacaaattttagatgaagcagaaagatcattgcatgatgctctttgtgttcttgcgcaaactgtaaaggactctagaacagtttatggaggaggctgttctgagatgttgatggctcatgctgtgacacagcttgccaatagaacaccaggcaaagaagctgttgcaatggagtcttatgctaaagcactgagaatgttgccaaccatcatagctgacaatgcaggctatgacagtgcagacctggtggcacagctcagggctgctcacagtgaaggcaataccactgctggattggatatgagggaaggcaccattggagatatggctatcctgggtataacagaaagttttcaagtgaagcgacaggttcttctgagtgcagctgaagcagcagaggtgattctgcgtgtggacaacatcatcaaagcggcacccaggaaacgtgtccctgatcaccacccctgttaagcattcccacgtgctgtcgatctttggaccagtttctagcaaagttgtgtttgaaagatactctattaaagaagactgtggaatctgtttatcggtgcccattatatccttaagtttggatatttagctgaccttcgctttaacataggtctaatttatttgccgtgtcattttccatacaaatcagttgatttaaaaaagttcatttctcatactgtgcattaaaataaaaatttgaacaattacttg

SEQ ID NO: 1330 - DNA, 1902 bp, Homo sapiens
gggattcacttgtgtgcggaactcctcggaaccatggcgtccctttcccttgcacctgttaacatctttaaggcaggagctgatgaagagagagcagagacagctcgtctgacttcttttattggtgccatcgccattggagacttggtaaagagcaccttgggacccaaaggcatggacaaaattcttctaagcagtggacgagatgcctctcttatggtaaccaatgatggtgccactattctaaaaaacattggtgttgacaatccagcagctaaagttttagttgatatgtcaagggttcaagatgatgaagttggtgatggcactacctctgttaccgttttagcagcagaattattaagggaagcagaatctttaattgcaaaaaagattcatccacagaccatcatagcgggttggagagaagccacgaaggctgcaagagaggcgctgttgagttctgcagttgatcatggttccgatgaagttaaattccgtcaagatttaatgaatattgcgggcacaacattatcctcaaaacttcttactcatcacaaagaccactttacaaagttagctgtagaagcagttctcagactgaaaggctctggcaacctggaggcaattcatattatcaagaagctaggaggaagtttggcagattcctatttagatgaaggcttcctgttggataaaaaaattggagtaaatcaaccaaaacgaattgaaaatgctaaaattcttattgcaaatactggtatggatacagacaaaataaagatatttggttcccgggtaagagttgactctacagcaaaggttgcagaaatagaacatgcggaaaaggaaaaaatgaaggagaaagttgaacgtattcttaagcatggaataaattgctttattaacaggcaattaatttataattatcctgaacagctctttggtgctgctggtgtcatggctattgagcatgcagattttgcaggtgtggaacgcctagctcttgtcacaggtggtgaaattgcctctacctttgatcacccagaactggtgaagcttggaagttgcaaacttatcgaggaagtcatgattggagaagacaaactcattcacttttctggggttgcccttggtgaggcttgtaccattgttttgcgtggtgccactcaacaaattttagatgaagcagaaagatcattgcatgatgctctttgtgttcttgcgcaaactgtaaaggactctagaacagtttatggaggaggctgttctgagatgttgatggctcatgctgtgacacagcttgccaatagaacaccaggcaaagaagctgttgcaatggagtcttatgctaaagcactgagaatgttgccaaccatcatagctgacaatgcaggctatgacagtgcagacctggtggcacagctcagggctgctcacagtgaaggcaataccactgctggattggatatgagggaaggcaccattggagatatggctatcctgggtataacagaaagttttcaagtgaagcgacaggttcttctgagtgcagctgaagcagcagaggtgattctgcgtgtggacaacatcatcaaagcggcacccaggaaacgtgtccctgatcaccacccctgttaagcattcccacgtgctgtcgatctttggaccagtttctagcaaagttgtgtttgaaagatactctattaaagaagactgtggaatctgtttatcggtgcccattatatccttaagtttggatatttagctgaccttcgctttaacataggtctaatttatttgccgtgtcattttccatacaaatcagttgatttaaaaaagttcatttctcatactgtgcattaaaataaaaatttgaacaattaaaaaaaaaaaaaaaaa

SEQ ID NO: 1331 - DNA, 2764 bp, Homo sapiens
aaaaaactgaaaaagttgaaagcagttttcctggagacaggaagtggtgaggcagataaattatgtttttccttattggtatataacactttaaactgtgtacatgtgtgactttaatagaagtgtttaaagattaaatttaagaaaataaaaagtgtgagcaagaactccatttctatggcaacccgcgcggcagccgcctctttgttctggagcggcggccacgccccctccagtgtgaaaggctgcgtttccggcccgtggggctccaatcaaaatgggacgcctgctggcggtaacgacaggccggggccccgccccccgaagtagggcgtgtggcgtcacttccggcttccttcagtccgctggtcccgagcacgagctgtgaggggattcacttgtgtgcggaactcctcggaaccatggtgagcctgactcccctgcctcttgccctacccctgctccgccgtgctcttgccaccccactgcttcctctgtcctgctagggtcgtaggctccgtttctgtctccccggccctccgcacatggtgcgagccatgcgcggggcgtgcggcctgcgccaggccagccggtggagctcaccacgagggggaggggtggaccgcaaagccagcgtctccttgtgcctaggtctttgcatagtcccggcagcccaggtccgcgcctcacccggagcgaagaaatttctagtgtgggacccgctccgccctccttctaggggcggagcctggagcgacggggtctgagccatcagagggtggaggggccgcagccttccgagggtggaagatggaggccgcgttccctcgcccgcccggcaggcgtcaccttgatggcctgcaacccctccctgcctcattcttagttcaagatcgtctttagtctcgctgcgtccctttcccttgcacctgttaacatctttaaggcaggagctgatgaagagagagcagagacagctcgtctgacttcttttattggtgccatcgccattggagacttggtaaagagcaccttgggacccaaaggcatggacaaaattcttctaagcagtggacgagatgcctctcttatggtaaccaatgatggtgccactattctaaaaaacattggtgttgacaatccagcagctaaagttttagttgatatgtcaagggttcaagatgatgaagttggtgatggcactacctctgttaccgttttagcagcagaattattaagggaagcagaatctttaattgcaaaaaagattcatccacagaccatcatagcgggttggagagaagccacgaaggctgcaagagaggcgctgttgagttctgcagttgatcatggttccgatgaagttaaattccgtcaagatttaatgaatattgcgggcacaacattatcctcaaaacttcttactcatcacaaagaccactttacaaagttagctgtagaagcagttctcagactgaaaggctctggcaacctggaggcaattcatattatcaagaagctaggaggaagtttggcagattcctatttagatgaaggcttcctgttggataaaaaaattggagtaaatcaaccaaaacgaattgaaaatgctaaaattcttattgcaaatactggtatggatacagacaaaataaagatatttggttcccgggtaagagttgactctacagcaaaggttgcagaaatagaacatgcggaaaaggaaaaaatgaaggagaaagttgaacgtattcttaagcatggaataaattgctttattaacaggcaattaatttataattatcctgaacagctctttggtgctgctggtgtcatggctattgagcatgcagattttgcaggtgtggaacgcctagctcttgtcacaggtggtgaaattgcctctacctttgatcacccagaactggtgaagcttggaagttgcaaacttatcgaggaagtcatgattggagaagacaaactcattcacttttctggggttgcccttggtgaggcttgtaccattgttttgcgtggtgccactcaacaaattttagatgaagcagaaagatcattgcatgatgctctttgtgttcttgcgcaaactgtaaaggactctagaacagtttatggaggaggctgttctgagatgttgatggctcatgctgtgacacagcttgccaatagaacaccaggcaaagaagctgttgcaatggagtcttatgctaaagcactgagaatgttgccaaccatcatagctgacaatgcaggctatgacagtgcagacctggtggcacagctcagggctgctcacagtgaaggcaataccactgctggattggatatgagggaaggcaccattggagatatggctatcctgggtataacagaaagttttcaagtgaagcgacaggttcttctgagtgcagctgaagcagcagaggtgattctgcgtgtggacaacatcatcaaagcggcacccaggaaacgtgtccctgatcaccacccctgttaagcattcccacgtgctgtcgatctttggaccagtttctagcaaagttgtgtttgaaagatactctattaaagaagactgtggaatctgtttatcggtgcccattatatccttaagtttggatatttagctgaccttcgctttaacataggtctaatttatttgccgtgtcattttccatacaaatcagttgatttaaaaaagttcatttctcatactgtgcattaaaataaaaatttgaacaattacttg

SEQ ID NO: 1332 - protein, 6 aa, Homo sapiens
AAPECK

SEQ ID NO: 1333 - protein, 8 aa, Homo sapiens
AAVDTYCR

SEQ ID NO: 1334 - protein, 17 aa, Homo sapiens
ACANPAAGSVILLENLR

SEQ ID NO: 1335 - protein, 7 aa, Homo sapiens
ACQLVNR

SEQ ID NO: 1336 - protein, 20 aa, Homo sapiens
AGFVGGQFWSVYTPCDTQNK

SEQ ID NO: 1337 - protein, 13 aa, Homo sapiens
AGSPTLLNCLMYK

SEQ ID NO: 1338 - protein, 11 aa, Homo sapiens
AHVVPCFDASK

SEQ ID NO: 1339 - protein, 8 aa, Homo sapiens
AKFENLCK

SEQ ID NO: 1340 - protein, 18 aa, Homo sapiens
ALEHVDGTHVCQLPEDQK

SEQ ID NO: 1341 - protein, 15 aa, Homo sapiens
ALNEACESVIQTACK

SEQ ID NO: 1342 - protein, 17 aa, Homo sapiens
APVIFSHSSAYSVCASR

SEQ ID NO: 1343 - protein, 12 aa, Homo sapiens
ARFEELCSDLFR

SEQ ID NO: 1344 - protein, 11 aa, Homo sapiens
AVIFCLSADKK

SEQ ID NO: 1345 - protein, 12 aa, Homo sapiens
AVLLVGLCDSGK

SEQ ID NO: 1346 - protein, 9 aa, Homo sapiens
AVVMISCNR

SEQ ID NO: 1347 - protein, 12 aa, Homo sapiens
AYLEGLCVEWLR

SEQ ID NO: 1348 - protein, 19 aa, Homo sapiens
CAPGVVGPAEADIDFDIIR

SEQ ID NO: 1349 - protein, 9 aa, Homo sapiens
CDDLEALKK

SEQ ID NO: 1350 - protein, 13 aa, Homo sapiens
CDGLIDSLVHYVR

SEQ ID NO: 1351 - protein, 6 aa, Homo sapiens
CDMDDK

SEQ ID NO: 1352 - protein, 10 aa, Homo sapiens
CETQNPVSAR

SEQ ID NO: 1353 - protein, 11 aa, Homo sapiens
CGPMVLDALIK

SEQ ID NO: 1354 - protein, 8 aa, Homo sapiens
CGVLGALR

SEQ ID NO: 1355 - protein, 11 aa, Homo sapiens
CIESLIAVFQK

SEQ ID NO: 1356 - protein, 11 aa, Homo sapiens
CKIPALDLLIK

SEQ ID NO: 1357 - protein, 9 aa, Homo sapiens
CLAALASLR

SEQ ID NO: 1358 - protein, 9 aa, Homo sapiens
CLIEILASR

SEQ ID NO: 1359 - protein, 10 aa, Homo sapiens
CMQLTDFILK

SEQ ID NO: 1360 - protein, 10 aa, Homo sapiens
CPDACNAQHK

SEQ ID NO: 1361 - protein, 11 aa, Homo sapiens
CQNALQQVVAR

SEQ ID NO: 1362 - protein, 10 aa, Homo sapiens
CRFPVVENGK

SEQ ID NO: 1363 - protein, 12 aa, Homo sapiens
CSGPGLSPGMVR

SEQ ID NO: 1364 - protein, 14 aa, Homo sapiens
CSTSPLLEACEFLR

SEQ ID NO: 1365 - protein, 9 aa, Homo sapiens
CVLPHMIER

SEQ ID NO: 1366 - protein, 15 aa, Homo sapiens
DCHLAQVPSHTVVAR

SEQ ID NO: 1367 - protein, 17 aa, Homo sapiens
DFVNCSTLPALNLASWR

SEQ ID NO: 1368 - protein, 9 aa, Homo sapiens
DGFVCALLR

SEQ ID NO: 1369 - protein, 11 aa, Homo sapiens
DIIACGFDINK

SEQ ID NO: 1370 - protein, 11 aa, Homo sapiens
DILPCLDGYLK

SEQ ID NO: 1371 - protein, 14 aa, Homo sapiens
DKPLKDVIIADCGK

SEQ ID NO: 1372 - protein, 9 aa, Homo sapiens
DTEITCSER

SEQ ID NO: 1373 - protein, 15 aa, Homo sapiens
DVCTELLPLIKPQGR

SEQ ID NO: 1374 - protein, 11 aa, Homo sapiens
EFHGLGDCIIK

SEQ ID NO: 1375 - protein, 13 aa, Homo sapiens
EGSPVLLNCLMYK

SEQ ID NO: 1376 - protein, 10 aa, Homo sapiens
EGVVECSFVK

SEQ ID NO: 1377 - protein, 14 aa, Homo sapiens
ELGSECGIEFDEEK

SEQ ID NO: 1378 - protein, 11 aa, Homo sapiens
ELNLSFCEIKR

SEQ ID NO: 1379 - protein, 23 aa, Homo sapiens
EMLSHESGRHSFLQRDCEYPTLR

SEQ ID NO: 1380 - protein, 13 aa, Homo sapiens
ESLCQAALGLILK

SEQ ID NO: 1381 - protein, 13 aa, Homo sapiens
ETCISFIKDFLAK

SEQ ID NO: 1382 - protein, 18 aa, Homo sapiens
EVLGSLPNVFSALCLNAR

SEQ ID NO: 1383 - protein, 13 aa, Homo sapiens
EYLPIGGLAEFCK

SEQ ID NO: 1384 - protein, 18 aa, Homo sapiens
FCGLPQPETVGQLGTVLR

SEQ ID NO: 1385 - protein, 12 aa, Homo sapiens
FEHCNFNDVTTR

SEQ ID NO: 1386 - protein, 9 aa, Homo sapiens
FHLCSVPTR

SEQ ID NO: 1387 - protein, 16 aa, Homo sapiens
FLQMCNDDPDVLPDLK

SEQ ID NO: 1388 - protein, 9 aa, Homo sapiens
FNNYVDCMK

SEQ ID NO: 1389 - protein, 25 aa, Homo sapiens
FPKPESQPVIKTYLSWRWLTTCLSR

SEQ ID NO: 1390 - protein, 19 aa, Homo sapiens
FVLSGANIMCPGLTSPGAK

SEQ ID NO: 1391 - protein, 6 aa, Homo sapiens
FVNCVR

SEQ ID NO: 1392 - protein, 9 aa, Homo sapiens
GACILNMLR

SEQ ID NO: 1393 - protein, 17 aa, Homo sapiens
GCITIIGGGDTATCCAK

SEQ ID NO: 1394 - protein, 10 aa, Homo sapiens
GGCILCGYLK

SEQ ID NO: 1395 - protein, 20 aa, Homo sapiens
GGLGGPRTGGSCEGAISWPK

SEQ ID NO: 1396 - protein, 8 aa, Homo sapiens
GIFPVLCK

SEQ ID NO: 1397 - protein, 16 aa, Homo sapiens
GPGLFFILPCTDSFIK

SEQ ID NO: 1398 - protein, 17 aa, Homo sapiens
GQDHCGIESEVVAGIPR

SEQ ID NO: 1399 - protein, 21 aa, Homo sapiens
GSWGTVCDDSWDTNDANVVCR

SEQ ID NO: 1400 - protein, 14 aa, Homo sapiens
GTINFLHADCDKFR

SEQ ID NO: 1401 - protein, 16 aa, Homo sapiens
GVLFGVPGAFTPGCSK

SEQ ID NO: 1402 - protein, 12 aa, Homo sapiens
GWTLTDADVVCR

SEQ ID NO: 1403 - protein, 15 aa, Homo sapiens
HFCPNVPIILVGNKK

SEQ ID NO: 1404 - protein, 22 aa, Homo sapiens
HGEVCPAGWKPGSDTIKPDVQK

SEQ ID NO: 1405 - protein, 13 aa, Homo sapiens
HGFCGIPITDTGR

SEQ ID NO: 1406 - protein, 17 aa, Homo sapiens
HLNEIDLFHCIDPNDSK

SEQ ID NO: 1407 - protein, 27 aa, Homo sapiens
HTGPGILSMANAGPNTNGSQFFICTAK

SEQ ID NO: 1408 - protein, 16 aa, Homo sapiens
HTYLPLEVCNIVAGQR

SEQ ID NO: 1409 - protein, 15 aa, Homo sapiens
IATGHNIIDELPPCK

SEQ ID NO: 1410 - protein, 7 aa, Homo sapiens
ICLDILK

SEQ ID NO: 1411 - protein, 14 aa, Homo sapiens
IECDDKGDGSCDVR

SEQ ID NO: 1412 - protein, 7 aa, Homo sapiens
IFQALCK

SEQ ID NO: 1413 - protein, 20 aa, Homo sapiens
IGSSELQEFCPTILQQLDSR

SEQ ID NO: 1414 - protein, 13 aa, Homo sapiens
IICDNTGITTVSK

SEQ ID NO: 1415 - protein, 17 aa, Homo sapiens
IIKPCNHVLSLSFPIRR

SEQ ID NO: 1416 - protein, 28 aa, Homo sapiens
ILNHVLQHAEPGNAQSVLEAIDTYCEQK

SEQ ID NO: 1417 - protein, 6 aa, Homo sapiens
INCQGK

SEQ ID NO: 1418 - protein, 9 aa, Homo sapiens
IPACIAGER

SEQ ID NO: 1419 - protein, 10 aa, Homo sapiens
IPCFLAGDTR

SEQ ID NO: 1420 - protein, 14 aa, Homo sapiens
IQNSSCTSLEHCFR

SEQ ID NO: 1421 - protein, 12 aa, Homo sapiens
IVGPSGAAVPCK

SEQ ID NO: 1422 - protein, 6 aa, Homo sapiens
KCILPK

SEQ ID NO: 1423 - protein, 18 aa, Homo sapiens
KFHYLPFLPSTEDVYDCR

SEQ ID NO: 1424 - protein, 19 aa, Homo sapiens
KFIQENIFGICPHMTEDNK

SEQ ID NO: 1425 - protein, 12 aa, Homo sapiens
KGDECELLGHSK

SEQ ID NO: 1426 - protein, 17 aa, Homo sapiens
KMEDSVGCLETAEEVKR

SEQ ID NO: 1427 - protein, 15 aa, Homo sapiens
KNTDLYHCLLEHLQR

SEQ ID NO: 1428 - protein, 6 aa, Homo sapiens
LCFSAK

SEQ ID NO: 1429 - protein, 13 aa, Homo sapiens
LCLISTFLEDGIR

SEQ ID NO: 1430 - protein, 10 aa, Homo sapiens
LDFVCSFLQK

SEQ ID NO: 1431 - protein, 17 aa, Homo sapiens
LGNGVQCLAMGWGLLGR

SEQ ID NO: 1432 - protein, 9 aa, Homo sapiens
LICEPYTSK

SEQ ID NO: 1433 - protein, 11 aa, Homo sapiens
LKTEGSDLCDR

SEQ ID NO: 1434 - protein, 17 aa, Homo sapiens
LLASALQTHGFHPCWPR

SEQ ID NO: 1435 - protein, 11 aa, Homo sapiens
LLCGGGIAADR

SEQ ID NO: 1436 - protein, 9 aa, Homo sapiens
LLCGLLAER

SEQ ID NO: 1437 - protein, 6 aa, Homo sapiens
LLLCAR

SEQ ID NO: 1438 - protein, 32 aa, Homo sapiens
LNKPFLFDTKPLIVQYEVNFQNGIECGGAYVK

SEQ ID NO: 1439 - protein, 9 aa, Homo sapiens
LPVLAGCLK

SEQ ID NO: 1440 - protein, 25 aa, Homo sapiens
LRCTQLPAITSSRPGPRGQVLLYTR

SEQ ID NO: 1441 - protein, 21 aa, Homo sapiens
LRPLFEACGEVVQIRPIFSNR

SEQ ID NO: 1442 - protein, 9 aa, Homo sapiens
LTCFELAPK

SEQ ID NO: 1443 - protein, 12 aa, Homo sapiens
LTFEQVYSDCKK

SEQ ID NO: 1444 - protein, 7 aa, Homo sapiens
MCYLTIK

SEQ ID NO: 1445 - protein, 13 aa, Homo sapiens
MLLCEAVAAVMAK

SEQ ID NO: 1446 - protein, 27 aa, Homo sapiens
MSASQLEALCPQVINAALALAAKPQSK

SEQ ID NO: 1447 - protein, 7 aa, Homo sapiens
MSCMDNK

SEQ ID NO: 1448 - protein, 11 aa, Homo sapiens
MYACDVGPDGR

SEQ ID NO: 1449 - protein, 23 aa, Homo sapiens
NLNTLCWAIGSISGAMHEEDEKR

SEQ ID NO: 1450 - protein, 11 aa, Homo sapiens
NLSGQPNFPCR

SEQ ID NO: 1451 - protein, 18 aa, Homo sapiens
NPMDYPVEDAFCKPQLVK

SEQ ID NO: 1452 - protein, 10 aa, Homo sapiens
NQADCIPFFR

SEQ ID NO: 1453 - protein, 10 aa, Homo sapiens
NQVSLTCLVK

SEQ ID NO: 1454 - protein, 14 aa, Homo sapiens
NTDLYHCLLEHLQR

SEQ ID NO: 1455 - protein, 15 aa, Homo sapiens
QLGCGWAMSAPGNAR

SEQ ID NO: 1456 - protein, 10 aa, Homo sapiens
QLVTNACLIK

SEQ ID NO: 1457 - protein, 7 aa, Homo sapiens
SCEVPTR

SEQ ID NO: 1458 - protein, 8 aa, Homo sapiens
SCHTAVDR

SEQ ID NO: 1459 - protein, 11 aa, Homo sapiens
SCLLLQFTDKR

SEQ ID NO: 1460 - protein, 15 aa, Homo sapiens
SCSSSCAVHDLIFWR

SEQ ID NO: 1461 - protein, 19 aa, Homo sapiens
SDLQRPNPQSPFCVASSLK

SEQ ID NO: 1462 - protein, 11 aa, Homo sapiens
SEDCFILDHGK

SEQ ID NO: 1463 - protein, 13 aa, Homo sapiens
SGILPILVHCLER

SEQ ID NO: 1464 - protein, 15 aa, Homo sapiens
SIAQYWLGCPAPGHL

SEQ ID NO: 1465 - protein, 10 aa, Homo sapiens
SICEVLDLER

SEQ ID NO: 1466 - protein, 21 aa, Homo sapiens
SLGLPENHIVFPVPIDQCIDG

SEQ ID NO: 1467 - protein, 17 aa, Homo sapiens
SLGTIQQCCDAIDHLCR

SEQ ID NO: 1468 - protein, 14 aa, Homo sapiens
SLHDALCVLAQTVK

SEQ ID NO: 1469 - protein, 21 aa, Homo sapiens
SSLNDPLCLVHPSSETCNSIR

SEQ ID NO: 1470 - protein, 18 aa, Homo sapiens
TAGTICLETFKDFPQMGR

SEQ ID NO: 1471 - protein, 24 aa, Homo sapiens
TCEEHQLCVVAVLPHILDTGAAGR

SEQ ID NO: 1472 - protein, 17 aa, Homo sapiens
TFVPGCQPGEFTLGNIK

SEQ ID NO: 1473 - protein, 12 aa, Homo sapiens
TGGLYSCDITAR

SEQ ID NO: 1474 - protein, 9 aa, Homo sapiens
TPCEEILVK

SEQ ID NO: 1475 - protein, 15 aa, Homo sapiens
TPCTVSCNIPVVSGK

SEQ ID NO: 1476 - protein, 15 aa, Homo sapiens
TPPLLENSLPQCYQR

SEQ ID NO: 1477 - protein, 11 aa, Homo sapiens
TQDECILHFLR

SEQ ID NO: 1478 - protein, 12 aa, Homo sapiens
TQILCSHLEGHR

SEQ ID NO: 1479 - protein, 21 aa, Homo sapiens
TREEECHFYAGGQVYPGEASR

SEQ ID NO: 1480 - protein, 8 aa, Homo sapiens
TVYCNVHK

SEQ ID NO: 1481 - protein, 16 aa, Homo sapiens
VCALYIMAGTVDDVPK

SEQ ID NO: 1482 - protein, 15 aa, Homo sapiens
VEDLTFTSPFCLQVK

SEQ ID NO: 1483 - protein, 13 aa, Homo sapiens
VEGCFNQLLYDIR

SEQ ID NO: 1484 - protein, 12 aa, Homo sapiens
VFVLPCIQQIQR

SEQ ID NO: 1485 - protein, 9 aa, Homo sapiens
VGAFTMVCK

SEQ ID NO: 1486 - protein, 14 aa, Homo sapiens
VGPLLACIIGTQFR

SEQ ID NO: 1487 - protein, 9 aa, Homo sapiens
VGTECGNQK

SEQ ID NO: 1488 - protein, 15 aa, Homo sapiens
VIGIECSSISDYAVK

SEQ ID NO: 1489 - protein, 8 aa, Homo sapiens
VLCTPPPK

SEQ ID NO: 1490 - protein, 15 aa, Homo sapiens
VLVVGAGGIGCELLK

SEQ ID NO: 1491 - protein, 12 aa, Homo sapiens
VPFLVLECPNLK

SEQ ID NO: 1492 - protein, 16 aa, Homo sapiens
VTVAGLAGKDPVQCSR

SEQ ID NO: 1493 - protein, 15 aa, Homo sapiens
WGTDEDKFTEILCLR

SEQ ID NO: 1494 - protein, 12 aa, Homo sapiens
WTELAGCTADFR

SEQ ID NO: 1495 - protein, 12 aa, Homo sapiens
YFSLPFCVGSKK

SEQ ID NO: 1496 - protein, 9 aa, Homo sapiens
YGTCIYQGR

SEQ ID NO: 1497 - protein, 14 aa, Homo sapiens
YLAADKDGNVTCER

SEQ ID NO: 1498 - protein, 11 aa, Homo sapiens
YLLDSCAPLLR

SEQ ID NO: 1499 - protein, 14 aa, Homo sapiens
YNPNVLPVQCTGKR

SEQ ID NO: 1500 - protein, 13 aa, Homo sapiens
YSVFRPGVLLCDR

SEQ ID NO: 1501 - protein, 6 aa, Homo sapiens
YVICVR

SEQ ID NO: 1502 - DNA, 31 bp, Homo sapiens
ggggacaagtttgtacaaaaaagcaggcttc

SEQ ID NO: 1503 - DNA, 29 bp, Homo sapiens
ggggaccactttgtacaagaaagctgggt
